United States Patent Application Publication US 2025/0195589 A1 - sequence listing, part 3

SEQ ID NO: 5 - DNA, 2416053 bp, Lactobacillus crispatus
  source 1..2416053: mol_type = genomic DNA
ttgttcgacattaataaattttgggaacactttaatgacgagatgcgtgctcgtttcaacgaagttgcctacaatgcatggttcaaaaatactaaacctatttcatataatggaaaaacacatgaattaaaaattttagttcaaaatcctgtttctaaaggttactgggaaaagaatctatcttctcaattgattcaatctgcctacggttatgccgacatcgagatcttacctgtatttaaaatatctgaagatgcggatattacagaaaggatcgtaacacctgcgccaaagcgtgaagcgcaagttcaacagcctaatttgccagaaaaagaattcactaaagacttgaagttaaacgaaaaatacacttttgataacttcgttcaaggtgagggaaacaagttggccgccggtgctgcacttgctgtagccgacagtcctggtagtttttacaatcctttatttatttttggtggcgttggtttaggtaaaacacacctgatgcaagctgttgggcatcaaatgctagcagagcgacctaacgcaaaagttgtctatatacagagtgaaacttttgttaatgacttcattaattccatcaaaaataaaacgcaggacaaattccgcgaaaaatacagaacttgtgacctgcttttagttgatgatattcaattttttgcaaaaaaagaggggattcaagaggaattcttccatacttttgagacactttataacgatcaaaaacagatcgtaatgactagcgatcggttgcctacagaaatcccagatctatcagagcgtttagtttctcgatttacatggggcttgcaagtcgaaattacgcctcccgatttggaaaccagaatcgctattttgcgacgcaaagctgaaacagaaggttggactatcgatgatggtacgcttaactatattgcatctcaagttgatactaatattagagaacttgaaggggctttagttaaagttcaagcttatgccacaattgaaaaagcagatattgacgttaaccttgcgcgtgaagcattagttgacctcaaattagttcaaaaaaatcgtggattacaaatctctaaaatacaggaggttgtcgcaaactatttccaaacttcaactgctgaattaaagggtaaaaagcgtgtacggcagattgtagttcctcggcaaatagcaatgtatctttctcgtgaattaacagatgccagtttgccaaaaattggtcaagaatttgggggaaaagatcataccactgtcatgcatgcttatgataaaatcgacaagcagatgaaacttgattctgatatcaaaactgctgtctttgacctaaagcaaattttggagcactaaaagttatccactgtggaaaaataaacaagttttacacaagtttttaaccgtaacaagtccgttattttaggcttcttatgagttttcaacagaactcacaggccctactactactaattaattatataattactaataaagagaaatcacacagctattcttgggaggaaaaacatgaagtttacaattaatcgcaatctgtttatcgaaaacctcaataatgtaatgcgggccatctcatcaagagctactattccaattcttagtggaattaagttagacttaacagaagataaacttacgctaaccggtagtgatacagatatttcaattgaaattcaaattccagtcaatgatgatttaaatgtggaatctacaggttctattgttttaccagctagattctttagtgaaatcgtaaaaaaattgcctggtaaagacttctcatttgaagtaaaagaaagttttcaaactcagatcatatctgaaaatagtgaatttacaattaatggtttagatgctaataactatccacgtttaccagaaatttcagatgctgcttcattcactatttctggtaaaactttccgtgaaatcattaatgaaacgcaatttgctacttccaatgatcaaacacgagcaattttaactggggtacgtttcttctttagtccagataaaattaaagctgtcgcaactgattcccaccgtttatctcaaagaacaattgctttagaaaacggacctcaagctgaaactgatttgattattcctggtaaaagtttgcaggaattagctagaatcattggtgaagctgatccagaagttaaagtttgcccaggtgataaccaagctttatttgtaattggcaacttgtccttctattcacgtcttttggacggaaattatccagacactgatcgcttgattccgactgaaaagaccactagtgttgaatttgacatttccgaattatctagtgcccttgaacgtgccagtttgttaactcatgctggccgtaacaacgtggttactttgactttagatgtagaaaatcaatcagctaagttatcaggtaaatctgcggaaattggtaatgttgaagaagatgttagcttcagaaatcttgaaggaaacaatttagagatttccttcaaccctgactatatgcgtgatgcgttaagagcttcagtaacagattctgtaattatgagttttactaagccacttcgtccatttatcattaatccagataaagaagacattgaatttgtgcaattaattacgccagttagaacatattaatcaagtacacaatatttaggtcataaaaagtcgtcaaataaggcgactttttattttgcttttaaacgaaaacgcaaaatattggcgtatatttatttttttaccgtgctagtgtgattaggttattttgaaaaaaagctctgaaaaggcttataagagcgatttagtttgttatttgtgttgaaaactaatataattatataggtataaagcgtattgaaggtgagcattattaagtattttaaagttgacggcgatcatattactttggggcaattcctgaaggaagagagcattatttcatcaggtggacaagctaaatggtacttaaaagataatccagtaactttaaatggtgaacttgaagatcgaagaggcaaaaagatgcatgttggtgatcatatagtggttaatggccaagaatatgagtttcggtagggaagtcaatgtatcttgatcattttactgtacagaattttcgtaatttaaaaaagcttgacgtaaattttgattcaaacgtcaatatttttattggcaaaaatgctcagggcaagaccaatttgctagaggcaatctattttttagcattaacacgttcacataggaccaataatgataaagatttaattggtttcggcggtgagtttaccaatttacttgggcatgtacataaaagccaggtggatcttgatttacgtgttttgatcacccaaaaaggtaaaaaagtatggattaatcgagttgagcaggcgaagttgtctaaatacgtaggtcagctgaatgcgattttattttcaccggaagacctcgagttgatcaagggtgcaccagcactgcggcggagatttatggatcaagaatttggtcaaataaatgcagagtatttatacttcgcaagtaagtatcggcaagttttaattcaaaagaataattatctgaagcagctagctaaaggtaaggcaaaggatcaggtctttttagatgtactttcagatcaactagctggtatcgccgctgaagttgtctttcgacgatttaaatttcttaagtatcttagtcactatgctagcgatgcttatgcacatattagtttaggcagtgagcagctttcaattgcttatcatccatcagtggctgacatccaagctgatgacagtacagaagaaatttatcaaaagattttagcaagttatgcacgaaataaggcaagtgaaattcgcaaggggacaactacttctgggccgcaccgtgatgatattgaatttaaacttgatggtcaaaatgcacatctttatgcttcgcaagggcagcagcgttcaattgcacttagcgtcaagctggcggaaattcaattggtgcatcaactaacagatgagtatcctttactcttgctggatgatgtaatgagcgagttagatcatggtcgacaaagtgcgctacttaattatattcatgggaaaacgcaaacctttattactacgactgacttagaggggatttcctgggaaataattaaaaagccgcgtgtgtatcacattcaatcaggcaaaattagtttggagaaggagaattaaatggctgataattcaaaagaaaatcttgaaaaggtcaaaaaatatgaaaaagaggctgacaagtataatgccagtcaaattcaggttcttggcggtctagaagctgtacgtaagcggccaggtatgtatatcggttcgactagttctcagggattgcaccacttagtgtgggaaattattgataacagtattgatgaacgacttgctggttttgcgaccaagattgaagttacgactaacgaagatggtagtgtcaccgttcaagatgatggacgtgggattcctgtagatattcaagaaaaaacaggtcgtcctgcattagagactgtatttactgtacttcacgccggtggtaaattcggcggtggtggatataaggtttctggtggtttgcacggagttggggcttcagtagttaacgctctgtccactaaacttgatgttaccgtaatgcgtgatggcaaaaagtactttatcgatttcgatcatggccgtgttaaggatgagatgaaacaaattggcacggttccacttgatgaacatgggacgattgttcacttctatccagatccagatattttcacagaaactattgtttttgatgacaagatcttgaagaacagaatccgtgaattggcctttttgaacaagggattaactttaacctttactgacaagcgtaaagacactgccgaaacagatgtgtataagtttgaaggtgggattaaggaatacgttgcctttttgaacaagggacaagaagtattatttgatgatccaatttatgttgaaagcacctataatggcattgatgttgaagtggctttgcaatatacaaatggctataagactactttgatgacttttgccaataatattcacacctatgaaggtgggatgcacgaggccggttttaagactgcgttaacacgtgtggttaatgactatgcacataagtctaagatcttgaaagataaggacgataatctttccggtgaagacattcgtgaaggaatgacagctattgtctcagttaagcaccctagtccgcaatttgaaggtcagactaagaccaagttaggtaattcggatgctagaactgctgtagataaggctttttcagaaacctttagtcgtttcttgatggaaaatccttcagttgggcgcaagatcgtagaaaagggtcaattagccgaacgagctagaactgctgccaagcgtgcacgtgaagtaacaagaaagaaatctggtctggaaattgctaatttaccaggtaagttagccgacaatacaagtaacgatccaagtatttcagaactgtttatcgtcgagggtaactcagccggcggttctgctaagcaaggtagatcacgtttaacacaggctattttgccaatcagaggtaagattttaaatgttgaaaaagcttcgatggatcgaatcttggctaaccaagaaattagatctttattcacagctttaggaacaggctttggtgctgactttgacgtttcaaaagcacgttatcacaaattgattatcatgactgatgccgatgtcgatggtgcccacattagaaccttgctgttgaccttgttctataactatatgcgcccaatgatcgacaagggctatgtttatatcgccaagccacctctataccaagttcgtcaggggaaagtggtcagatatcttgatactgacgaagaattgcatgattacttaggtagcttgcaaccaagtcccaagcctactgtgcaacgttacaaggggttaggtgaaatggacccagagcagttgtgggaaactactatgaatccagaaaatagaagactggatcgggtaagtcctgagtatgctaaagatgctgacgcagtctttgagctcttaatgggaaatgaagtttcaccaagacgtgactttattcaaaagaatgctaaatatgttgaaaacttggatgcataggaggattagatggacgagaatcaaactcaagatcatagaattaaaaacgtcgatctaactagcatgatgcgtagttcatttttggattacgcaatgtcagttattgttgcacgtgctttacctgatgttcgtgatggcttaaagcccgtacaacgtcgtattctttacggtatgagcgagttgggggtaacgcctgataaaccatacaagaagagtgccagaattgttggggaagttatgggtaagtttcacccccatggtgattcctcaatctatcttgctatggcacacatggcacaagatttctcataccgttacatgttagtcgatggtcacggtaacttcggttctgtcgatggtgatgagccagccgcaatgcgttataccgaagcaagaatgagtaaaattgctgtggaaatgttgcgcgatatcaacaaaaacaccattgattggcaaagaaactatgatgataccgaaaatgaaccggttgtcttacctgctagaattcctaacttgcttgttaacggtgctaacgggattgccgttgggatgacaacaaatatcccgccacataacttgactgaagttattagtggtttgcacatgttaatgaaaaatcctgatgctacaaccaaggacttgatgaaagttatcccaggtcccgattttccaactggcggaattattatgggacgtggtggtatctaccgtgcttatgagagtggtaagggtaacattgttgttcgcgccaaaaccaatattgagactgaaaagagcggccgcgagcgcataattgtgagcgaaattccatttatggtaaacaaggctgaattggtgaagaaaattgctgatttggctcgagaaaagactatcgatggaattactggtgtgcgtgatgaatcagaccagacagggatgcggattaccattgatattcgccgtgatgctagtgctagcgttgttttgaataatttattcaagcaaactcaaatgcaggctaactttggtatgaatatggtggctattgttgatggtgcgccacactttttaaccttgaagcaaatgctgcaatattacttggatcaccaagaagatgttgtaactcgcagaacaagattcgagttagctaaggcagaggcaagagcccacatccttgaagggttaagaatcgctctggacaatattgatgaaattgtccacattatccgcaatagtcaatcaagtgacattgctaaagcaactttgattagccgctttggccttgatgataagcaatctcaggctatcttagacatgcgtttggttcgcttgactggcttggagcgcgataaggtagaagctgaatacaaggaattacaagctaaaattgctgactacaaagatattttgtctaagcctgagagaattgaccaaattatctatgacgaattgcttgatattcaaaaacgattcggtgataagcgaagaaccgaaattggtgctagcgaagtcgtttcaattgaagatgaagatttgattgaaaagcaaaatattctgttgacggttacccataacggctatattaagagaatgccaattcaggaatttaagactcaaaaccgtggtggtaaaggtatcaagggaatgggtgtacaagatggcgactttattgagcatttgatttactcaagtacgcacgatctgctcttgttctttactaatgctggtaaggtttactccaagaaagcctatgagattcctgaatacggccgcgcagctaaaggattgccagtagtcaacttattgcaattggaaaagggcgaaaaggtccaaactgtaattaatattccggaaggtgctgacgataattacttattctttgttactaagatgggaactgtaaagcgtacacacgttagcgaattttctaatattagaaacagtggtttaattgccttaactttgaaagatggcgatgaattaagcaatgttttgactactgatggtaagcaaaacatcttaatcgggactcacttgggctacgctgttaccttcaatgaaggcgatgttcgggcaatgggtcgaactgctgctggtgttcgcggaattaacttgcgtgagcatgactatgttgttggttcaggtattttaggtgctgatgaccaagtcttggtaatttctgaaaagggttatggtaaacggactccagcttcagaatatccagttaaaggccgtggcggtaaaggtattaagactgccaatattactgagaagaatggtccattagctggtgtaacaatcattaactcaaataatgatgtgatggtaattactactgacggaattatgattcggtttagaattgatgatgtttcgcaaactggccgtagcaccatgggtgttcgcttgattaaagttagcgatgatagtcaggttgcaagtttaaccgttgttccaactgaggaagaacaagatcaaactggtgacgatgacgactcaaaaaatggataattaattaaaaaaacaaaaaatttgaacttttaaaaaaattatcaaacttttttgcgtaataaataatgagcagtaaaaaatctgctaggatcacgtgaaaacagtttggtaattttttatttatatgctaaaattagaaattgcgagtaatattccattactccttgttcttgattttagcaagaaccatatagtccagaaggaggtgcaatagtcatggcaactacaaagtacgaagtaacttacatcatcaagccagatgttgacgaagacaacaagaaggcagttgtagaaaactacgacaaggttatcgctgataacggtggtactatggtagaatccaaagactggggcaagcgtcgtttcgcatatgaaattgataagtatcgtgaaggtacttaccacattatgactttcactgctgacaacgctgacgcagttaacgaatttagccgtttgtcaaagattgacaacgctatcttacgttcaatgaccgttaagttagataagtaattttaatttattatccgttatgtgatttaggaaaggaaggtacatgagtatgattaatagagttgtacttgttggccgtttaacacgtgatcctgaattacgtactactgggagtggaatctcggttgctacgtttactcttgctgttgaccgtcaatttacaaatagccaaggtgagagaggcgcagatttcgtcagctgtgtaatttggagaaagtcagcagaaaacttctgcaactttacttcaaagggttcattagttggaattgatggccgaattcaaaccagaagttatgataataaagatgggcaaagggtatatgtaaccgaagttgttgttgataacttcgcattgctcgaatcacgcaaggatcgtgaagcccgcggtcaaaatggtggttatacaccaaatagtggaaatgctggcagtcaacctgctaacaatttcccaaataatggcggatcacaaggtaattcacagactaataacaatcaaaataattcacaagatccatttagtggctcaggtgatacgattgatatttctgatgacgatctaccattttaaactaaattaaagaaaggattctagaacatggctcaacaaagaagaggcggccgtcgtcgtcgtaaggttgactacatcgcagctaaccacatcgactacgttgactacaaggatgtcgatctgttgaaacgttttatctcagaaagaggtaagattttaccacgtcgtgttactggcactagtgctaagaaccaacgtaaagtagctaatgcaattaagagagctcgtatcatgggcttgttaccattcgttgctgaagactaatttagatcgaaataaaccaaaaggacaggacacaaggttctgtccttttttcgtataataattaaaaaaattctctcttcgtattgtaccctaagtgtataattttttacggtaagttgaataaataattaaaaaagcccaagtcctttgaatttggacttgagctcaaacaaaaagaccagtagtctgatgttaagaacaaaaaacacattagaagctggtcttttatgaattcaattgtaactgaaatcgcaaatattataaagtctgaagataattatattaagcgtgaaagaaaaataatctgtttcttcttaaacctgattaaggaaatcatggccttggctttagctaaagttgatgatgaaatgattaccaaggttaaagcacagggatatcagattgataagaagaatgagcgctcaatcaatatggcttttggcgaagttaggtatgtcagaagaagatatgtctgcccaggcaaacaagcaaggtatcccttggatgaattaataggctttgacaaatacaagcgctacagtattttagcagtcaaaaacatcttagaagtaagcagcgttgccacttatcgcaatactgctctagcagtcaattgcctgtctggctttaatattagccatatgcaggtgggcaatttggtaaaaatggccgggaaaaatattaaagcgggccaagaagcagattcaagatatgatgccgcaggcactaagaaaaaggtcccagttttgtatcttgaaggcgatggcgtggtgatcaaaggcactaaaagccggttggaatttcatcgctatcaggtctgtgaaggcattgtcaatataagcaagaaacgcagaaagcgaatcaatgccaaggaatttgtttctttaagccgacttgatgcgctgaacgaagccaaggagtacctggccaatacttatgatctttctgatactgtaattcttagcaacgccgatggcggtgctggatatgtcaaaacagacttcgatgacattgtagggctatgcaagcgtcatgagcatttcttggatgtctttcacctaaataagaaaatcaaagaaaggctatattttgcgcctgacctgcaaggcaagctgatttctgctttggaatacaaatacagctatgacaaaactatcctaaccactgcagaaagccgactaattgatgaattgaataccgagctcaatcatgattatctggggcgcctaaagaattatattgatcgtcattgggacgatattaagccgtttaagaaacgaaaactgactgtgactaaagccattggctgctgcgagagcaaccaccgcaagtatacctaccgtgttaaggggcaaggcaagaaatggtcaaaatctggagcagaaggcatgcttaggatcttaagctgcatcaagaatcgagagctggaattttggcttagcagcgagtttgaagattcagaaataactgtattgactgaacaggaattaaaagcagcggcccgtgacagcttaaagaagcgtcatgaagttcatttaggcatccagcatggcgcattaaccgcacaggtagctggcaatagttatttaagcaagctaagcagaaatttaagtcatataaatatttaagaaattaaggttagactaatggtttaaaggctaccgcaaaaacattgacacttactattgtacctactgttttcaatcatgagccggaataaggtataattaacactgatatactatatctattaggaaggatcttcatgaaggattttttacgtaagctagaattgcctgaatttattaaggattcacggctgacagcttctataatcattgcactttctctttcattattgggaagcattattgcgatgattatgaatccattgtttggtttggcaatgcttttagtctttattttgaccgttgcctttgccatctatgggacctatattttagcgggtaatgcaaatagctttgcggttaatttgtcttaccggataaagcgtagtgaacaagaagcaatgattaagatgccgttgggaattttgctttatgattcggatcaccaaattcagtgggttaatccatatctgcaattatatttaaagagtacagatttagtggggcacacaattgaatcagttgaccctgatctgaataagctacttaatgaagcaattgaggcaaaaacagcagaaaatcatctggttgattgggatggtcaccgatttgaaatggtggtccaaaataatttaggcgtaatatatttattggatattacgcgctatgccaaaattgaagataaatataaagctgaacgattggcgattggtcaaattttcatcgataattatgatgagctaagtgaagcaatgcatgatcaagaattgaccagcatgagttcatatgtgcaaaatacattgagtgattatgcgaaaaagtttaacgcatatttaaaacggattgatgaagaccatttcttgatcttgatccatatgcaagaattagctgagatggagaaggacaaattctctgttttagataaggtgcgtcaagaaacgagtagaaacaatacgccacttactttatctatgggaattgcttttgggagtgattctttgtctgaaattgccaaccaggctcaatctaacttggattttgccctaggtcgaggtggagaccaggttgtcttacgtcaacccggtaaagacgcccgcttttatggcggtaagtctaatccgatggaaaagcggactagagttagagcaagaatggtttcacaagcaattagtgaactatttaaagatgccgatcaagtttttgttgttggtcatcagcgtcctgacatggattcagtcggtagtgggattggcgtagtaaaattagctcgtcttcacggagttaaagctaattttgttttagatactaataagacaaactatgatgttggtcgcttggtcaccttaatgcaacagaaaaatcaggataaggatatttttattaaccctgatgtagctttagctcaagttactgacaagtcaatgttggtaatggttgatcattcgaagtattcaattacttactcacgggcactttatgatcgtttgaagaatcgaatcatcgttattgatcaccatagacgaggcgaggaattccctgaaaatccaatgttaacctatgttgaaccatatgcttcttcggcttgtgaattggtcactgaaatgattgaatatcagcagccagctaacggtaagcgagttttgaccgatattgaagctacagcaatgttagctgggattgtggtcgactccaaggaattctcgttgagaacaggaactagaaccttcgatgcggctagctacttacgttcaatcggggctgactcagcagttgtaagcatgctcttgaaagaggatattgatagtttcctcgaacggacgcatttagtagccactttgaagatggtgaagccacatatggccgtattatgtggacctgatgataagattatagatccgatcattacagcgcaggcggctgatactgcacttgatttgggaaatgtgggtgctagtttcgcaattacgcggcgcagtgataatacgattggtatttcagctagatcaatgggtaagatcaacgttcaaattattatggaaaaattgggcggtggtggacatctttctaatgcggcaacacagattaaagatgttactattgaagaagcaaaacaaaaattacttgatgcaattgatgaatatgaaaaagaaaatgattagggaggacaaatatgaaagttatttttactcaagatgttagaggtcgaggtaagcgtggacaagttaaggacgtacctgatggctacgcacaaaattacttgattaagcgaggcttggctaaagaagctactaaaggtaacatgaataccttgaagcgtgtagaagctaatgaaaaggctgcttatgaagcagaaaaggccgaagcagaaaagatcaaggcagaacttgaaaaagacgataccgttgttaacttcaaatctaaggctggtactgactcacgtttgtttggttcaatctcaagtaagaagattgtggaaggccttgaaaagcaatacggtatcaaggttgataaacgcaagcttaacttgccagaaccaattaagactttgggctatactaatgttcatgccaaattatttaagggtgttgaagctactattcgcgttcacgttactgaacaagactaataaaaagtggttgtgattgatggataatatcgtttctcaacaaattccgcatgatcgcgatgccgaaagggcagttctgggtgcgatttttatcgatcctgaagcaattgcggatgctagtgcggtagttcagcctgaagatttctatgagcgggctaatcaaattgtctttcaagcgatgttggacttgtctgatcgcggggatgcaattgatacgctgaccttacaggatgaattaaataaaagaaatcagttagaagatattggtggtatcggttatgtttctgaattagcgatggccacaccgacagcagcgcatgttacctattatgccaaaattgtgcataggaaggcgctgcttcgtcgtttaatctctgctagtcagaagattatctctaatgcaatcgatggctctgacgatgtaacagacattctagatgacgctgaaagtgaaattatgaatgtttcgtcagagaatagcacaggcggctttaggaccattaaagagatcgttaattcagcgattaatgatattaataatattccggatgacggaaatatggttactggcttgccgactggttttgcggaattagataagatgacaactggttttcacgatgatgaattgatcattgtagctgctcgtcctggtgtgggtaagacttcatttgccttaaatattgcgcaaaatgtagggctacacactgaaaaaagtgtagctatgttctcactagaaatgagtggagagcaactggttcagaggatgttagcttctgaaggactgattaattcacagcacttgagaactggccagcttgatgaagaagaatggcgtaaattggtagtggcttctgggtcactagcaggtgcgcaaatctttatcgatgatacgcccggaatcaagatgagtgaaattcgtgctaaatcacggcgattagctaaggaaaagggcaatcttggtcttattgtaattgactacttgcagttgattgagggaccacgtagtgagtcacggcaacaagaagtttcagctatttcacgacaattaaaaaagctagctaaggagcttcatgtgcccgtcattgccctttcgcagctatcacggtcagttgagcagagacaggataaacggcctgtactgtccgatattcgtgaatctggatcaattgaacaagatgccgacattgtttctttcttatatcgggatgattattatcgcgatgagcctaaagatggcgaaagtagtggcagtcaagatgaagttggcgcagaagacgataacggtgaagtagaagtcattattgaaaagaaccgttctggtagtcgggggacagttaaattaatgttctctaagccgtttaaccggttttcaaatttggattatgcacatgatcctaatggcaattaagattaatcaagtgtctgggaaaaaactaagtctcagatcatgaaaaaagaacgttgaatttttgtttcaacgctctttttgtatacttttagctccagccttgatattattaaatcatcacaaaataaaaacaaaaaggtggaaactaacatgtacaagaattatatcacaggtcaaactgctttaacacttaatctagattttgccattccggccaatcatttggctaatgtcatcagctggtttgtagattcaattccagaagatgttttagtaggcaagactgctaaaacgggccgcccagcctatcatccagccatgatgctcaaaatactgctttttgcttactccagaagagttttttctggcagaaagattgagttgatgctggaagaaaatctgccaatgatgatcttggctgaccagcaaaagatttcatatcatactatcaataattttagatcaagcagccatgccaatgaactgattaaaaagagctttatctacttcactaacctgttagaagatgaaggcttaatcaatgaaggtgctgcttttatcgatggtactaagattgaagctgatgctaaccgctatacatttgtctggcgcaaagcggttgaaaagtatcatgaaaagctgaaaggccaggcagttgaactttatgatgaattgattactaaagaagtagtcaaagaaatggaaaaagaaaaagttcaaactagtcaggggctaaaggaattagctcaagaaactgaagcagaaattaacaagctgactaaagagattgagcaggaaaacaaagccattcctggcggttcacctcgaaaagccaagcgacgtggactaaaaaagattctgcaccggctaagaaaagattatgtgccaagaatgcaaaaatatgaagaagccgaagagatctttgccggacgcaacagttattccaaaacagatcatgacgccacctttatgcatatgaaggaagaccacatgaaaaatggtcaattaaagcctggctacaatattcaagcagtcacgaccgatcaatatgtagttgattatgccatctttcctaatccgacagatttcaaaactttggagccggttttggatcaaatgaccgtgttggacaagtttgacaaaatcgtcgccgatgctggctatggcagtgaatacaattattcgatgctggaggaaaaatatccagacaagaagtactttattccctacactatgtatgaaaaagaacagaccaaaaagtataagaatgatccaactaagctaatcaactggtactacaatgaaaaagatgattattacattgatcatcatggcgtcagattcaatttcaaatattacagccagcgtaaggatcgttctactggtcaggtccgtgattttaaggtttatgaggcagacgagttccagctaacgccagaattggaacaattggctaaaacagctagcggccgccagcgccaagttcgctataatcctaactggcaatatttaaaagaaaaagcaaaagaagttctccaaagcgaagaaggcagacacatctatggcatgagaaaatatgatgtagagccagttttcggacatttgaagaacgtatttggcatgcgcagaacgcacctgcgaggtaaagagaaggtcgaaaccgatatcggaattgcctttatgatgatgaatttgaacaaatattgtcaaagaaggtggctgaagggccgatttttattgttaaaaattttaaagagaacaaaaaaacgatcaagattcttaaaaaaggaaatcttgatcgtttttattcatctggaagctagttttttcccagacacttttttgtacttaaataaaacacaaacaatatttgcatagtattgtactataatttatattttatattgaaagtacacttaatatttgttataactaatattgaaaagatcaaattacgaatatactactcatggaggaatagcgagtttatgaagtttaagaaaattttgcttggtgcgtgtgcagttttagcagtcgtttcactagctgcctgctcaaatagtaagaagagttcatcctcatcgaatgaacctaaggaattgaacgttgaatttgtaccaagtacccaagcaaataagatggaagctaaggccaagcctttaggcacattattgcaaaagcaattacacattacagttcacgtaaccgtttctaccgactatagtgggctggttgaagcaatgtcatctaagaaagttgacgtaggctttatgccaccatattcttacatattagctcataaaaagggaattgctgatgttttattgcaagccgaacgttacggctatgatgaaccatccggtaagatgaatcataccttaatgcataagtatcgtggtatgatcgtggttaagaagggctcaaagatcaaatcttggaaagacttaaagggtaaaaagattgcgattggcgatcctagttcttcatcgggctatgtttatccagttgcggaactttacaaaaagggtttgaatgtaaccaaggactgcaaattagttaatgttaagggtgacgatcaagaagtgttatccgttttgaatggggatgttgatgccgcattcgtcttctcagatgcacgtaatattgccgctaaggatgacaagaaagcaatgaccgatgttgtgccaatctactttaccaagtggattccaaacgatactattgcggttagaaaagatatgcctaaaaaattcagagttaagttagctaaggctttcaagaatattgctaagtctaagaagggtaagcaaattatcgaaagcatttataaccattatggttacgttgaagctaaggattccgactttgatggcttacgtcaataccaaaagattgtgaacaaggctaccggtggtaataattaagattaaaaaagcactcactaagtgctttttttgtattcatgctaagatcagttaaaataaataaaacactaaaagcaaaaatgaaaagagaagaaaaaatatgaaaattgctgttttaactgatagctcagcttatttaactaaagaacaacaagaaaaatatcaaatcgatgttttgccaattccaattatttggggcaaaaaagtatatcatgacttagtcgatattggttatgaagaattttatcaaaaactaaatacagcaaaagagctgccaactacttcgcagccttcaatcggtgatcttaagcagaagattgatgaatacgtggcagcaggctacacggatgttattgtaattactctttcaagtgggatttctagctatttctcaaccgttcagagtgttgcggcagaagaagaccgaatcaaggttcatccattcgatagtaaaattacctgtgctggtgaggcggattatgctatgttggcaggccgtttaatcgaggctggagcggatattgatttgatcatgcatgatcttaaggacctgcaaaaaacgatggatgtgcgctttatggtggacgatttgagccatttgaagcgtacaggtcgtttgtctaatgcggcaagttttgttgggacgctgtttaagattaagccgattttatcgatggatgtgcaaaatgaaggccatatttcagcgattgcgaaagagcgtcaatataaacgtgcatacaagcatgtgcaaaatgattttgataatttgactaaaaatatgccgtataagattcaggacacaatttttgattcacttgatcctgagaaaaaacaggcctggcttgatgattaccgagctaagttccctaagtataagtttgatactagtattatcggccctgttgttggggtgcatgtaggtcaaggtacaatgtcgatgatctggtgccgtgatttggatacttattttgatgaaaatggtcagccaatcaagggaattgagtcacaagcagtagtggatccagagtaagcataataccgatatggcaaaaaaatgagaggcactattgattctttaatatcattgctatattattattaataatttaatatggcgatgaatagggatgatcagagtgtcaatcagttcttttttaaaaagttaatagccaaaaataaactcttgtttttagctatggtgattactagtgcttttgcttctttagatggcgtcatttctccttatgttattgggaaaattactaatacactttctcagaaacattttagtgagataccgaaaatcttgttactgtatctgttgatgatgctttttctgaatgttagcttttatctatggcaattttgttggggaaaaattaccaaatcaagtaatgaattattgagatctacagcttttaataattttattgcttcccctagtgaaaagaaaatcactaataccctgaattttatcaatgttaatgttaaacaaattgaaaatcaatgtattgattcaacaattatgcttgtttactgcgttgagcaagccatcgtttcattagtttatattttaagtattaatggcattgcagcaatggttttcttagtttgtgggttaattccatcagttattccacgtttaactcgtaattgggttcagacaggaactaaaaagtggaatagcagttatgaaaactataatcaaaaaacaagtgatgctgtgtatggttttgatactatcagacatgcaaatggtgataatagattcaaaatatttgtccaaaaagcattaatgggagaagaaaagaagtattttttgatgaattttcggcgtaatacttctaattttttagcccaggtctcttattcattatcaatggttatttctttggctgttggtacattctttgtaattaatggtcaaattctagtaggtggtttgatttctctatttttagcatcagatcgtttaactagtccaattatttcgattgttaatattgcaaatcaattgacctctgttagtcctctgctaaaaaataaagctttacaaaaatctaaaaagcaagaatttaataatttagacttcaccaaattaccaaaccaagagaaaataatttttgatcactgcaatttagggtattctaataaagctattttgaagaatattaatttgacagtttctaaaggcaataaagtattgatcatcggtcgttctggtattggtaaatccactctgttcaagacattgcttaatgaaattccattgctaaagggcaaaatactggtagataatagtcttaaccaagctaatttctataccaattttggtattgttagtcaggatacttatatattcgctgaatctttgcgctttaatttaacgcttggaaaagattttcctactcagcaagtaataaatgttttgaaaactgttaaattaagttatttagctaatgaaaaaagcttagacatgcagatcggggagaagggattatcactttcgggtggagaaaaacgaaaactggaaattgcacgagctttattgaatcaaaaatcgattttacttgttgacgaaggactatctggacttgatgaagaaagcaataaacaaatttttgcacttcttcaaagtcttccgcagacagtaattgaaattgaacatgctgttagtccagaagagaaaaatcaatttgatcaaattattgatctaggagctcagtattgatttttttataaataaacaaaaacaattacatacgtatgaaagcctttacacataaagacttttttatttataacttaaacttcccacacgcaaaattgcttgtttcattgtgattctgcgtgttttgacaaatataaaaggcacaagtccttttcattgctataattatattgaccaaaacataatttatttgcatgaaaggcttgtgccaatgtctattttaccatctcctgaccaacaaaatgaacaactattttcaaactcaatcatcagcttcatcaagaagtttcaggtgatcaagctgttgagaaaatgtggcttccgcaaggaaaaaggcattagcctgttcagcttgtttctttacgttttaagcaatgtctttcgtgaccgcagcttatatatgcagctgaaaatggatcattttcaagaaaatttttccaagaactcatattaccgttttatgcgcaacgttcacgtcaattggctccacttcaccacacttctgtctgcgcaaatcattaataaccacttgcgatctttgacttcagaaaaacgggctgattgctttgttgtcgatgattcctacttctctaggaccggcttcaagaaaacagaattagtcgccaaagtttttgaccatgtatcaatgacttacaagaaaggttttcgcatgatgaccctgggctggactgatggagcttctttcatgccaatcaattcagtgctgctgtcttctcagaagctacagaatatgattggcgaaaataaagtttttgatcagcgcaccattgctggccaaagacgtatgcttgcccggactaaaggcacagacgtgatggttaatttaatcgaccaagctatgaaagcaggtcatcaagccaagtacgtgctgtttgacagctggttctcaaatccacatcaaatcgtccagctcaagcaaaggaagctggatgtgattgccatggttaaggttagctccaaaatcaaatatgaatttgagggagaacgcaaaaacatcaaacagatttatcgcagctgtaaaaagcgatgcggccgttctcgctacctgctgtcaatcccagtcaaagtcggacgccaggacaaagacggtgctaaaatagatgcacggattgtctgcgttagaaaccgtgccaatcgcaaggattggctggcaatcatttgtaccgacatgtcgcttagcgaagatgaaattatccgcaactacggcaagcgttgggatattgaggtttttttcaaaacttgcaaaagttatctaaaactaagtacggaatatcatggcctgtcttacgatgctttgaccgctcatgttgccatagtttttactcgctacatgcttatgtcagttgccaagcgggacgatgaagatgaacgcacgctaggcgagctgttctattgcatgattgatgagctggcggacattacttttagccattccttgcaattgattactgatgcaatgctggccagcgtaaagcaagtctttcatgccagtgaagcacaaatagctgaattcacggctgactttatcaatcgtttacccaaatacatgcaaaaattgttaaagaaaactagcaaaaataatatagaagcctaaagccaagcaagatcaagagattactggcttatttagtgtgggaagtttaagttataatattagcagcacgaaaactttttggagaaaaacttacatacagaaaaggatgagaatatggcagaaaagaaatatgtcggcagtatcgaagcaggcggtactaaatttatcgtagctgtgcaagatgttgaaacaggtaaggaagtagcgcgtgatcgtattcctaccactactaacaaggagactttacaaaagactgctgaatttttcaaaaagcaccccgttgatgcattaggaattggtacttttggtccaattgatatcaatcctaactctcggacttatggttacattttggacacgcctaagccaggttggtcaggtacagatgtgaagggcttctttgaaagaaaattaggtattccagttgccatgacgactgacgttaacgcatcatgttatggtgaatatgttgctcgcggtcgcgatgattctaagagctacttctatgcaacagttggtactggcgttggagctggaattgtgcaagcgggtaagttgctcggtttgaataaccacccagaaatggggcacatgttggttcgtcgttatcctggtgatgattatgaaggccattgcccattccataatgatgcttgtgttgaaggcatgtctgctggtccaagtcttgagggcagaactggtatccctggtgaaaaattgtctcgcgataacaaggtcttcacttattctgcgtattacattgctcaaatgctcttcaatgtttacatgtctgctcgtccagatgtaatgattgttggcggttcagttttaaatgaagatgatttggttaaggtaagaaagttctttgatgaatttaacaacaattacgttgccacacccgatttgaatgaattaattgtgcgtcctgctgtggctcacaacgggtctgcaactcttggcgattttgaattagctaagaatttgctcaaataaaaaagcatagataaattgaataagcaataaaaaggctcaactcgttaagaaagacgtaaggcgagccttttttgacgtaatttgacctaaatgcgcgtaatattaattctagaaacgtaaccggtttattaagaaaggagcccaactatgaacaaatcagatagtggcttaaaagacaaagttatcggtaaagtgaaagaagtcgaaggtaaaattaccggcgataaatcacgcgaagtccaaggaaaagctcaacaagccaagggcaaagttaaggacaaagccaaaaaattaaaggatgatctggaaaaagaccatcaaatagatgaagattgttaaagactcaggtcgactagcaatagctaaacagaaagcaaataggtgatcctatgttatcatggatctgggttttaatcgttggcgctataataggtctaatagctggtttcataaccggcaagggtggatcaatgggatttctagctaatttaatagcagggctggttggttcaaccttaggccaagcaatctttggttcgtgggggccgcaaatggctgggatggcaatcgtaccatcaatattgggagccgtcatcttggtactagtggtttcctttgtactagggatgcttagaaaaactgaataaaaatagaataagagaagtgtctgggaaaaaactaacccttagatactgaaagacgatcaatccaactcttaatttgagttgcttgaccgtctttttctgtctatttttatttttgaacaaagaaaattggtcttttgaccatcttctgttccaatatttgcttaaattcatcatcatgaaggctattcctatatctgtttcaaccttctttttgcctcttaaatgagttcggcgcatgccaaagacgttcttcaaatgtccaaaaatcggctccacatcatatttcctcatgctgtagatgtgtctgccttcaggactttggagaactgctttggctttttcttttaggtattgccagttaggattatagcgaacctgacgttggcgtccgctcttagtcttggctaagtgttctaattctggcgttagttgaaattcatctgcttcatagaccttaaaatcacgaacctgaccagtcgatcgatctttacgttgactataatatttgaagttgaatctgacgccattttgatcaaggtaataatcatctttttcatcatagaaccagttagccagcttagtcggatcgttgcgatgctttctggtcttttccttttcgtacatggtataaggaatatagtacttcttgtctgaatactcttcttctaacattgaataattatattcgctgccataaccagcatcagcgacaatcttgtcaaacttgtctagtgtcgtcatctgctttaaaaatggttcgaaagttctgaaatcagttggattagggtataaagcaaagtcaaccacatattgatcagtggtggcagcttgaatattgtagcctggcttgagctggccgttcttcatgtgatcttccttcatatgcatgaaagtcgcgtcatgatctgtcttagaatagctgttacgccctgcaaagatttctttcgcctcttcatatttcttcattcgaggaacatagtcttttcttagtttatgaagcagctttttaagaccgcgtcttcttgcttttctaggcgaaccgccagggattgctttgggttcttgctcaatttcttcggtcagcttttcaatctcggcttccgtttcttgtgctagctctgccaaaccttgactggtctggactttctcttttgccattgctttgacgacttctttggcaatcaattcatcataaagctcaaccgcttgacctttgagcttgtcatgaaatttttcaactgccttgcgccaaacaaaagtatagcgattggcgtcagcttcgattttagtgccatcaataaagatcgctccttcattgataaggccctcggcttctaacaaattggtaaagtagaggaagcttttcttaaccagctcattggcatgcttgctggatctaaagttattgatagtatggtaagaaatctgttggtgttcagccaaagccatcatcggcacgttttcttccagcattaattcgatttttctgcctgaaaatactcttctggaataagcaaaaagcaagattttaagcatcatcgctggatgataagctggacgaccggttttagcagtattacccaataagacatcttctggaattgaatcgacaaaccagctaatggtattagccaaatgattatgaggaatagcgaagtctaagttgagtgttaaagctgtttgacctatggtataattttgatacattaagattgccttctttctttttgttttgtggtgattcaataatatcaaggaaggcacttaaagtatagaaaaagaacgatgaaatccattaggaaatcatcgttcttttttcctgtctgagaattagttttttcccagacactttgtgtttcatgtgaaactattttagcttttttcgttcattttctttctcagctaaaaaacgttgcttaatttcttcaggcaaaagactagggaccgtcttgtcataaaattcaaagaatatgggtgccttgttagagtcattgctcttgggatataaggcaaagtcactttcgctaaacggtaagctgatattaccacgtaaagcattgataatctcaccgaacatatgcaaaacataacggcgcgtctcaggctctaatgacatgattacgcgactgaaacggacagtgcctaataatttatgggcagtaatttgaaaaatatcggtaatatttaattcatcaaatgcttggaaaagagcatcccataattcaccacgttgcttttcagggatgctgtggttaaagtcgatgaagaaatgccgcaaagaacgtgcacctgaagtaagtccttctgctagaacaaaactatcacggccaacagaccaacggcgtggatcatgttgctggaccatcggtgcagtgcttttgacgattaaaacgtgttcaggatgatcaagcatggtgccaatgattgaagcttctgggaggtaggtcttcatcttgggtaatgcacgtacaaagccaggtgctttccagacttggtggaaaaagccggggccgtcaaagctaaaggccttgataatacggtcctgcaaatcaggctcagcgacacttaaagcatattcagcgtaattgccacctttagagtgacctgctaaatatattttgtcgtgaggaaattccgcagcaatttcttttaaataatgagcagcaacatcttgcccatagactttaggcatgtagttcatgttcatatcttcgttccagccaattaatgaactgtcagtgccacgatagacaataataattttattgtcagttagtcgaaaagtagcagcggtgaattgcaaaggatatgggtctttttctaggcgattagtccagttaagaatcttaactttgcccaagcgaggtgatttgggcaaaagcagaacttgatcaccagctaaatctttcatttgtacctgaaatgaaggtagtactcgcagtttttcagctacttcgcttagggtgtgtcctttggcagatttgtcgacgggcagataaataatggaggcgaagagagagacatccacactattgaaaggacgctctttaaaagaaagatctccacgccaacgtaaatattcaagtgttccggccataatccaatgtcattaagttaagacattgacaattaagggtgcttttttagagatcgaatcatttggattcgatctctttttttgtataaaataaaggcgaaaagaccagccttttcgcctatcttatatattatatattttaaaccttcaaaattattgccagaaagatggtgttaattatgaaagcccttcataagaatattctagaacgtcttgatcaaattatcaataatactggggatcatattcacgattttattaataatcctcatgcttttaccaggaaacgcactttagatgcagcgacagtccttaaaactacaattaacatgcaaggtcagaatttaaacagtgaactctttagagcttttggcgaagatgcaactaaaaagaacgataaagtagttagtacttctgcctatgttcaacgcaaaagccagctttctcctgcttgttttaaacatattctgactgtttttaatcaaaatctatttaatattcaactttttgatcatcactaccgtttgtttgccattgatggctctgactttaatcaaatctggaatccgaaatcgaataacattgtacaagcttcttctcataaaaagaaaccctattgtcaaattcacgttaatgccttatatgatctattgaataatacctaccaggattgtatttttcagcctaaatcagaaatggatgaacgcaaagcggctgttcaaatgcttaaagctttgaattgtggtccatatattgtaacaatggatcgtggctacactagtttcaatatgattgaaaactgcaatcgcctgcctaactgtcattacataatacgaactaaggctggacaaggcggagttaaagaaataacgacattgcctgatcaagaatgtgatcgtgagatttcctgcctggtaactacttctaactattactacatcacgcataaagccagtgagaatattcaccatgtccagcatcattatcgccaatatattaagtatcgctctaaaaatacccaggatctaagctgggattttggcgagttatgcacaataaaatttcgagcctgcaaatttagaattaatgatgccaaatcaggcaaagaagaatgggaagttgtgctaaccaatcttgatcgaaaaaattatccgctaaaaagaattaaagagctttatcatctgcgttggggtattgagacctccttcaagaaattgaagtattctttaggcagtgtacagttccattccaaacaagataaatttattgaaatggaaatttatgcccatatgattatgtttaatgcaatcagtcaaattgatgcacaggcctatattccgcaaaagcattgcaagtatcaatatgccatcaatttcaagcaatcatgcttgattattcagagcatgtatttggcttcttctttaacgcaagattttgaacggatccttattcagatcagctattataccattccaattagaccaggccgcaaggacaagagaaatattaagcccaaatcagctgtatattatttatatcgcgtagcttaaaaaagcagaatctgtgctatgccttatttgttgtacgaaaaaagcaccaatttaaccaattaaatgttaaatcagtgctttaaaagtctaatattaattgtcaatgtcttaacttaatgacattggccataatctcgtcctttctttcacttttagcaataatactattctactagattattgtggcaaaataaaaaatctcaggcgaatgcttgagatctaaacagaattttaaataccaccacgcgtatagctgatgcgcgtaatatctggatacttacgtaagttcatgataattgaattttcgtcaagtttattattgataaccccatcaatgtagaaaactatccgatcatcacttacgtctaaaattttgatagtaatattttcaactttattttctgcaagttcatgtttaattttagacaaaatgtggtgctggttaatagccacaatttgaatgttaaaacgaacatgtggcgttattttgttgataatgacatcatcgtgaaagatcatttgaatgataaacaatagggcggttgataggataccgatgaaatacatgccagcaccaacagccatcccaatggcggcagttgcccaaactccagcggcagtagttaagcctgagacctgttcttttctaactaggattgtacccgcaccaatgaaggaaattcctgtaacgatctgggccgcaattcttgatggatctagtgcaatgtcatgcatgcttaatagatcggtaaatccatatttagatacgatcatgaataaagcagaagcaatcgcaactacgatatgagttctcacacccgcgctttttctctgaatcgcccgctcatagccgattaatgcgccacaaaaagctgcgacaacaattctaagtagccaatctaattcggttgtaattggagctaaagtttgcattatttagtcctcatcctttgtataatcaacaattattatcatttctattttaacgtaaatgcagaaaaattatagtctggggaatttttttgaacttttttcaaaaaagacttgcacagctctcgtctatgtggtttaattaatactgttgtcgggtgagacaacgaagagttgctgacttagctcagttggcagagcacctcactagtaatgaggaggtcggaggttcgaaccctctagtcagcattagttaaacaatttaatagtttttaagtctatcaattaagttcgaaagagcttgatatgataggcttttttgttgtttctagatatttgtgtagatttaaaaatagttatgaatatttagtttcaccacaaaaattgccacacagtttttctagtgtggcatctgtgtggcaaaggttcgattaatgttgtagtggcgggctttattgcttgccatttttttcgttttcaaagtatccatgatttaagaatgactgtcgatactcttttaagatttttatttgatggtctatggcaggaactaacgtatatgcattatttttattgtagaattcatccattaatttagtattcgattccttgtagtccttaatgaaattactatcattttgattcataataatttcttctaactgcatacgaataactaaattaacattattaatcatttcaagatcattggcaccttccaatgattcttcaaattttttatcaaataaaaatttgaatttatctttccaaaaatttattacgtatgatttctttttataatcttcatcatttttagtaaaagaatcagcggtatctttatctccatttatagaaagaaagtgagaaatattatttttcatattactcaattcttcattattatcataatatgctgaaaaaagtaaattaattaacttactctctacttcttcacctctaattccttcgccttttacataagatactggaactttaaatatttctgctaaagctttccatacctcttcatttggaattctgcttcctgcttcgtatcttgctattgttactcgtgtagctgatatgtttttgttctttaaaagattagatagatcttgttgtgtaaaataatttttttctcttagttctttaattcgatttggagtcatattattacctcactaagattaattttatacgattggtacataattagcaaaagtaccaattttggatacaaaagtgttgactacaagaatgaataattgtatattatatgtaaccaaatgtggtacacaaaattataaataaccatttttggaaacaaaaaagaaagagggaatattaaaaatgtccagtaatgtaacaaagcaaggtgaagtactatctaccttcaacgaaagtagtagtaaaagaaccccaattcaatcagcattaacaagaccgttggttgaagcaattggtaagtgttttctattgttgagcggaaccacagaagaagttcaagatcctaatgatgagtctaaaactattccgcgcgcagtatacgaagtaagagttattagctctaaaactagattacctattggaactgtgctaacggtgaaaattaaaggaggtaagagtgtaattactgatgaagagaataagaagttactgttaggcttagagaaaaataaggtagtagcattcgacgatctaagtcattggaactttaacggaaatgagggattatcagcttcaggtatgcgagtattagaagtcagtccgcaagaggctatgaatttatagaaatgaggcggcttatatgaaaataaaaaaattagtcttagataccaaaaacccgttaggcaatcctaacggggtaaaaatggcattaggagtaactttattatcttcaattggtcttgagtataaagttgcacctcaattcataaatgctggtaattataccgcattagcttatccatttttaattaatattatacctctagggtatccatgctggaaatgggttaatctccatatcgttaattataagatctataagcaattgatgaatattgttcattcggaacaattaatagactatggagataaaaaagaaactaccactttcggtgaaagaaaagttgaatatggtgtcaagatcgtctatgaagaaacggcagaaggtacatatattactgtatatcctaatggtataaaacatagcgacgccactcagacgctaaacaataggctagaggaaactttcaacatgaatgttttatcggtagatcatcagctagcttatacgaaatatttattgagaaatgtaaacagacaaagaatggaggtttctaatgataacttctaatttcgtaataaatcttgataagaatacatcattcagttttaaaggtagtggtgggattcttgtcactgggagaagtggctcaggcaagactaataccaccacatatataatgctgaaggcgatgtcccaatgtgattgcggtttatatattattgatgcaaaaagagctgatatgtatggacttcatcaatttttaaaagatggcaagaaggtagtggcaagtacaacaaatcaaatagcacgattgttgcgtgttcttaatgagaacatgagcgcacggtatgagcattttaagaatggaaaatggggacaggatttcgctgaatatggatatagaccatatttattagtcattgatgaagtatctgcgatgttggctggggctggtaagaataagaaagaaataatgggtgaattgcgtcaagttatccttcgtggacgacaagcagggatatttacccttatttcagggcagagaattgatgcaactattttagatcgtgatattaccttacagttaggtacaagaatcgtgatgggacaagcagattcggagacttatcgcatggcttacccaatggtaaatgatattaaagcattaccattagtacctaataagccggggtatggtcttatctattcagatgggcaaaaaattagcaatcctactccatttgtctcaccggatatgtctaacattgatgttccaggggtaattacgaggttagagaataattttgatccatctaaatatattgatgaatcaagctattgggaggtttagtaattgataagttgccagctggcgggcgacagagtcgcacgaatggaatgtccaagcgtgagcgggctggcaacacccaactaataatatgggtgtaacggaaagattattaatcatggaaacgatgaataatattaaaattgatcaacttcgtctaaatattccatatgatgaaatctatcaagtagaaaatagtcaaagtttacccaaagaagttatagtagctgataatctgctgcatctggcatggttgtttaagtctaatacagtgagtcatggacataatggctatacttcttcatataatttcggttcaggagaacaaggcggaaatatttccgtaatgtggaacgagtcaagaaaagatatgggaatactagtcgactttactgcgacaggcaaagcgctatatgaaagccttgctgaattacatggaattcctgttaattggaagaaaataattgaagaattatatgaaaaaatggggcatatatcgaggctagatatagctactgaccttattaattatggtttttcagttaacgaaattattcaaaggttaaagaatgaagaatcatttttcttgaatactcaaggaaataaaatcaatgctaatcgatttaagataattggaagctatagtgaagctcagactctatatatcggtagtagaaaaagtgatgcttttctgagaatttatgataaaaaagttgaacaggatcgagccgatggactctatagaaacttggctagaaactgtaacgattggataagagtagaagcagaatttaaacaccgtttagctaaagaactaggaaaatatattacaacattaactgcagataatatttatccttatttacttggctgtgtactagaacgttggtcattagttgatagggaagaataatgacatatgaaaaattccaatattctaaagaatggaagattttaaaagagttatcgaaaggacaaggacttcaagaactaaaacaagctcaagttgacgcttccctgaatagaaaaattaattggttcttgtatggtggtgccagtggagttattacgttgattaaagaaatttatggtgatgaagcactaaaaaagttttatcaatttttagattattttatttctaatcctgatacgttaggacattactaccactcggacaagataaaggcggatactaaaactattgcagattctacgcaaggcttgaactttggagaatatttagaagacttaaagagagaattagttgagggagataaacagaaaggcaggggctaatatgtttggcacagagttactcaacgctagacaaatagcagaagaattaggtattagctatacttacttttttaaattaattaaaaatgggtgtccttatcatcaacttggagaccaaggacgtaaatattacgttttaaaggaagtacaagagtggctattagtaagtagccaacattaattagaagacgtagcaacttgctacgcttttttaggagaaagctatgtcaattacacaaattaaaacggggaaaaataaaggaaaataccgtgttagaattcaacctactgataatgaaacaggtaaaactattccgattcctagtaaagtaacaaaaactagcagtaagcgtgaagcaaaacaattagaagaacaaatgtgggtgcaatatcgcgcgcataaagaaatgaatttaaatgtattagatcaaccacttgcaaaagctttagatcactatgtagaagaagaaagaagttcggggcgttggtcatcgattactacgtatgataattggaaatatacggttaagcttgtttctcaatatttcggaaagaaaaaagttaaagatatcaaagaaaaagatatgcgtagttttgctagaaattacataagtacacataaagcaactgtggcacctcattcaacgctagatagacagttacaaaatttaaggagttattttgctactttgaaggaatatggtgtcttaaagaatcctattcctatgaagccattaactaagttttttagacgtgatgaaatgaatgcccctgttaagaaatatgttttcactaataatgaaattaatgttcttaaagatagaatttatagagagcttggagtaacaagaataagttattggacaactagaattgctatcttgatagctctagatactggaatgagacctcaagaaattcaggctttaaagtggagtcaaattactaatgatggaagttttaaagtttttagaataaatgactcatggaatgaaaaagagaagcatcttaacggacatttgaaaagtcgaccgcatggagaatctagactaacccttcccctttctgaaccacttttgcagttattgaataagtttcgtcattgtcagttagaacttttaaaggagaatggtttaactaattttaatgatcgaattttattgaacatcacagattatcacttgtgcgcattagggtatccaataactcaaaaaagtatgaatgatatgttgaaacagttgagtaagaaagtaggggttaataatcaaaatttaaatataagtatgtatacttgtcgtcatactgtagcaacaaaattagggaatacaccaggcatgtcttacccttgggcggcaagcagattagggcattctttaaagatgtttatgcggacatatgtacatgttgatgaagatcgaaatgaagaaatgcttagattgatagctaaaagataaaagaaaaatgcaaaaataacttatatttgataaaaaaatgaattaatgtagtaatagcaagaatttgaaaataataaataacaaataatttttaacattttatagattttgaaaaaaaaagagcgtatactcagggcatcataaagagatgtgaaggagaaatcaaaatggttattgtagaacaaaagtttaataaatataatcatacaagcaacatggatgctatggagtacgctgcaggatgttgcacatgtacaacaacaagttgtacaacttcatgtgccgctgtagctgaaagttaatggatagttggcgctgtaaattatattacagtgctttttttaggagtataaatactgttatgtgtctattaagaataaaagacttaaaagttaattttaaggatcaaacagtactggattttagaggtcatgatatagagataaagtcaggagacaaagtagctctaattggaaaaaatggggcaggaaaaagtacactattaaattgtcttttacatgaagtaaaatacactggctgtataaaggagaagtatcatcagtcggatataggagtagtttttcaagaaaatgtatattttaaattcttgaaagtttatgaaatctttgaattagtgtggaataaacctaaaaagttaattttaaaatctaaatttattaagaattttaatttagcaagcattatgaataaatacatttctgacttatctggtggtgaaaaacagagattaacaatagctttggttttttctcaaaataaaaagatttacttactagatgaaataaattccggcttagattatgataacaggcatgaattaagtaaaatcataaataatattactgaagaaaaaacagtaatacaaataagtcattattttgaagaagttgaaaattgggctaataaattgataatccttgatagaggcaagatgatatattttggaagcttatctaagttttattctataaataagcatgattcattaattattataaatgataaaaaaagcctatctagactgacccagaagcctttaaatctttatagtaataaatatattgtatctagtagtattgatgagagacatgatataacaaatttattagagcaacaaaagatagattataaagtggtgccacaaaatttatacacaacttataaattagcattagtaaaacatgaggataggtaaaataatggctagagaaattttattaagtttaaaagcacaacttagagttccaattgctgtatttttttctattttttttccaattattatgatgattatgatgatgacatcttacggtaatttttcattaagaaatggatatcactttatagataagtatttttttattagtactactataggtattctacctctaaccttaattagttttcctattgatataaataatttgcttgaaactaagcattacttacgtttgaaatacttaaatgttgatttaaaaaaattatttttatcaaatattatttcttatttgataattgtatttatttcagttggaataaatttaatagtaggaaaaagtatatataatttaagattacctagtatagagtatttatgttatttttttattcaattattctattgtgcgatagttctacttatatttggcttactgttaagtttaatagtatcagatatcaaagctttaatgcctgtaggaatgactataatgtttatattatttatggttataggtgtttttgtacagtatagctccttaccgaaaattatacgtactatttctagctacataccagtaaaatatttggcaaatgatttctattatatctggattggtcaggctaaatggaatatgccattttttaaatgtaatacgatctggcttatttttctgtgtttgatttgttacataatttatagaaggaagaataatgttacgaagattttcaactagtaaggatttaagaattgggatagagataatagttggaatcactttatcatttatcattaattttataatgatttcaattgggtatgccattacaaatagtgaaaaattaaaagaatattcggtcaattattttggattagtcatatataaaataaagaattatggaaataaaggtataccagtttccaataatatgatgtttatcggaatagttttaacaataatatttgtttttattgtagagtgggttgtatataagagggataagaatggtagagtatgagcttaaaggattatttaatcaaaatacgctttcaacatcagatattagtaataataataattacaataatcaacaattatttgatcatattataagaggaaatgctaattctgagatgctgacatacttacttaatatgaaccatcagcgattgaatgattttaagagtatgcatcaatataattatggaaattttgcatccttaatgaacagtgtagaacagtataacgaaatagaaaatgatgaaactattttgctacctaagccattgagaataaaaaataagttacagcaggttctaaagaaaagaaaaagtgttagaaattatataggcttatcatgtgatttacgagaattgtccacaatattgatgtattcatttggaatctcgggaagaaaagagaattttggtggaatagtcgcaagtatgcgatattacgcttctggaggtgctctatatccaatttcagtgattatatatataaataaggtggatggattgaaaaaggggctgtatttatatcagccaatgtatcattccttattaccactaaatattaaaactcaaatcgatattaataaattatttgtaggaagtaacattgatgttaaaaatagtagcttttttgtattttataaatatgcgattagttctacatatttaaaatatggtgagctatctttagctaatattttgattgaagcgggaatgatggcgcaaaatttttccttagtaactacagcatgtggttttgggtcatgtccaattgcaggatataacaaaagatttattgaagatatttgtaatttagatcatgttaatgagcatataatttttactgaaagttgtgggagaaatgaatagcgatacgattttttttgtaaaaaaagatacacatattaattctaatacgcgtggtgctagttaaatcgttttagttaataaaaaagtccaatcttgttagactcgacttgtaaatagtaataatagaaaagagtctgatctgattgaactgccttaagcttaagcgttttagccaccatttacaagttagttttaaagatttagtgataatttgtcggcactggtatcgtttgtatgcaccggctgagtttactcatcggcgaaatattgatcaaattaaaactacggacagtctgattttggctttacttatctggcaagctaagacaggaattgaatcacaaagaagattctgtgaatgtttcaattgtttatcacactcacgttttaatcggcgttcacgtcagctattgcaattgatttatcagatacggcaagaaatgaataaaaaggttgacctgaatggacagttcttgatcattgacagctttccggtacctgtttgccaaccaattcgaaactatcgtgctaaaatttttcgcggttatgccaacattggttataaggccaccaagaaaatttacttctatggtttcaaagttcatgccattgttagcgatgacggttacattcttgattatgtcgtaacaaaggcatcagttcatgatgccagggagacagttgaactgatagaaaatacccatccatctaattactatcttcttggcgacgaaggctatttaggcaaagaactgcatcaacagctaaaacaaatgggttacgaactttggacaccatatcgtaaaaatatgacaggagctaaaaagcacaatgatcatcaattgatggctattcgcagaacaattgaaagcgacttttcgcttctgacctattacaatgccgagaacaatcgagcacgtagtctgataggctttcaaagccggttggaaattgcaattttagcttataatttggcttattgtctagaacgatttaactagcaccacgcgtattctaatataaacgaatggatattaagtaagggaataattcataaaagcactttaacaataagtaaaaatgaaagtagtactttgtttgtaagtttattcaagcaattaatacaaaatcaggaaattaaagttagtgaagatgatgaagagtattcagactttaaaaaacttgttcagcttggatttttaggaataagaaataaaaataaaaaagtagcacttattgtggaagaaagtgcaaaaaacttctttgaaaactatttaaaagatgaaaatatatgtgttagctcattagatgagtttataactcaagatacattaaatattttaattgaagaaaaaaataatactaaattaaataaaatagttcaaaactataaaaataaatacaaagatgtagatttgatttttgtttgttctttgtattatgaaaattatttaaaaggaatcaacaagctaactaaattaattagtatcccatataatataggattttatgataataataatatatttgctactagaataatacatggagagactggctgctatcaatgtcttgaaaatcaaatactacaaaaatttgatggatatatcgaagattatgtatcagaaatggattctgaaaaacaagtatttgatataaaaaattatggagtattaatatctataattaagtcagagatagaagaactaaatttatactctgatacagagctacgaggaaatgttcttcatttttatttacctacttatgaatacaattttgataagaatagaattcaaagtgattgctcagtttgttctactataaataatattttatttaaagaacaaaatatgaaagcgtgcaatattttagccgaggttttaggtaatgataaatatcaagaataatttagaatataatttattgcgtcaacggatcttgggtggcgctataactggaatctggaaaaaggatactttctttattggcgaaagttcgtatccggtaatgaattataattatattactgcaaactttactaattttgaaaaattcgcttttcctggctatgttcccccgattaattatcatcttagtggctacggcttatcttataataaagctttatcggcttttctaggtgaaagtacagaaagatattctttttcagtcttatatcaaaacattaagcataatatcatttattctgattatcaaaatcttcagaaaaagtattctaattgttatatagtacctttaaattatattaatatttatttttcaaaagaagataaagaaaattatataactaaaaaagatccaataagatggatagcattaaattcactatttgatattaataaaaaggtactagttccgcttcagttttatattatgtataccaacagtatatttaaaaatgaaaaaagaattgtaaatagtgctacatcaacaggaactgcttcgcaagaaagctttgataaaagtctggaaaatgccatagttgagttcttacaaatagattcttttaatctttggtggtatggaggtctaagaggtaaaaatttaaatattgatacagaaggcttattaaaggaattgttcccaaacaataatagactttggatgtttttaaaaaaatttacggttaattttatagatattagttttgacaaagcaattaatgtagttgtttgcgaaattaccagtaatagtgatagtaaactacctaaatatgtagtaggagttcaaggaggattttgtttaaataagtgtattgaacgatccttttttgaatgtgtaactgttttagaatattgttttactcaaagttgggttgaaggttctaaatttaaaaagatttctacaaatatagatgatttaaatgtaaataatttagacgataatgtattgttttatgctaaaaatggaaagcctaaattaatcaaaaaagagaatattttaagagtgtccaaaaaggttactaatttaaaagatttgcttttgaatttaaagagcatctctaagtatgcaggatatttaaatattacgcctccagaatttagaaatcaaaactttgaaatatgtagagtatttataccagagcttttaccaatttctttaccgtcttatccgccttattatcatccaagatacagtaaaataggaggtattattaataatgtcccccatcctttggcttaaaatagcttttttcatcactttgtttccaggcggaatatatttgataataagaagaatattgtccagccatagaaaaagcataacagtatatttaataaccttggtaattgtagctattgtaaataccattattttaaagatcaattttaataggtatattgaaatcatcttaatattgattattccttttacgtattatttttttgagtatgttataaggtataaaagattcaatatcttaagttttaaggctaataaaacaattatttatgttttagttttttttcctatatttgaagaagttgtttaccgtttctttatatttaaatattgttcggttttaggcttttctggaatacaggctatgatatttgcaacgttatgctttgaattttcgcacatatattatttaggctttaaagctattaataaattatttttttcctttattcaaagtatgttgtttttggtttttcaaagtttattgttaataatatggagactgtaaaatagtttgtgtaaggatgaatgattccttaaatttatttctttaaacattagaaaaaggagttcctttctcgtatgattggtttgaacaaaaaaacacatacagaaagaagaactccttcatgaatgattttaccaaagattttgctcaagctctattcaatccagacaaaataaatgatttattgcgcaaagagctacaacaggctgttaataacttgctagaagctgagttgactgcctttctaggctatgatccctatgccagaaatggctggaatactggcaattctagaaatggtgcttatttccgcaaggttgatacccagtttggaccaattgaagtgcaagtgcctcgagaccgcaacggtcagtttcatcagcacacgctgcctgactacaagcagcactctgatgttttggaaagcacgattatcaagctctactccaaaggcgtaactaccagagaaatcgctgacttgattgagaaaatgtatggcagtcattatagtccagctcaagtatcaaatatttccaagcagatgctccccaaggttgaggcttatcacaagcgcaagctaagcgacaagtttttctgtgtctatttggatgcgacataccttcctttgcgccgagaaacgtttgagcgtgaagcagtatatattgccattggcattaaacctaatggacataaggaagtcattgactactgcattgctcctagtgagaacattgaagtctggacagagatgcttcaaaacatgaagtccagaggcttgaagcaagttgaactctttctttctgatggtgttgttggcatgaaaacagccttggccaggacttatcctaaagctcattttcaacgctgcctggttcatgtcatgcgcaatatctgtgctaaagtccgggtggatgaccgcgaaaagatcatgaacgaattcaagcagatacatcaacagacaagcaaaaaagaagctgcagctgtcttgcacaaattctatgccagatggaataaagcttatagcaatgtcatcaaaggtttgaaggaaattgagcccgatctgctggtcttctacaattatcccaaacaaatcagagcttcaatttattcaaccaatatgattgaatcctttaacaacgtcatcaagcgtaaagctaagcctaaggcagaatttccaactgaacagtcgcttgatgcatttattggcatccaggcaatgagctacaatgaccgctatttcaaccgaattcataaaggctttggtcaggttcaggataccttagaatcctattttgattaaataaatgattaaaaaatcaatttacgagaaagaactatttacacaaaagatttgacagtttcataatatgtttacacataatttttaatttatatgtgtatttacacaaaaaagatatgtataaagttattttttgatattgacttgtattacgtatataacaatatgtgccacacggtttctagaaaaatcctaaagagtgctaattttaaaagcaaaaattgttaagccttttacgcttctagtcagcattagaaatacgtttaagtctttcaaataagttcaatgaagcttgatttgaaaggcttttttgctactttgaactagaatgaaattctttgaaataataaggatttatttgaaattaacacaattcaaacacacagatacgattcatgtgttaagaatgtgcttgaaggaaaattaagagtactaaatatagtgatttaacaggcgttggagcctgttttttttgtgtttggttagggcattttgtttaaattaaattcagtggatttttgtgcaaaaaaatagccatattgtagggttatacatattgactattttctattattaaaattatttcaattcagccacaaacctaattccttgataagaaggaaacttgtaattatcccatgaaaaataagtgtctggaaattagttctttctatttaatctcaatgctatttcaagttagctattaatctgtatcctaagaatccattgctagattttggattccaagcaatacctacaccaatttttgtatattgaccagataaaagaatgtctctatgtccccaattagatcctgcatcatgataaatgaaattatttaagcaaatttttgcttgtgtagatggggtatcagtattatcaactgcacctccagcaagcacttctgcgtattgagtgcggcttccgtctggccttgtatggctaaaacttgtatttgcttcggtagctctagtccttgcatattcttgcagagaagtatcaagtgttaaagaatttagtccctttgattgacgtaattgatttaattgcgcaataaattcttgttctaatttggtagcaaaatcagaatccttaatgtttgtatattcattattgggttttgtatttgtggtttcattatgcttaataaaattgcttgaattagcactttgagtatttgtttcatcggatgtacttttagtaatagcagatgttttagaagtgtcaggttctgaaactttgtgagttaattctgaactaatccatttgttagttccaactttgtaccatgttttaccacggctatccttcttttctgcataaacatataagtattttttaccatgaattattttagtgcggtaagcttttacacttctgcctttcttgagtgttcttgctcctttaatacgcttgcctttatagttgtaaacataagcattgtgagtaagttttacgctgctagtgcttgcttctactacattggcttgttcgttgccagcaacaactgtagctgaaagcaatagagctgatgaaagcgtaatggttgatagtaatttagtaacgtttttcttttgtaacatggtagttacctcctatattccttatttcagattagcaataagactgtaccctaaaaatccgttacttaatacgggatcgaaagcaaatccaactccaatttttgtatattgactagataaaagaatgtctctatgtccccaattagatcctgcatcatgatagatgaagcttctcaattgttggctggcttcttgctctggtgtacttgtgtcgttaactgttcctcctgcaagtacttctgcatattgagttctacttccatcgggtctaatatggtcaaatttagtattggcttcattagctctggttactgcataagattgaagtgtattatctatgcttaatggcgctaacccattggatctacgtaattcatttaattgagttacaaaagattgttcagtttcatttgcaaagtttgagtttatgatatttgaatacgtctgttcatttgaagccgaattattatcttgttgagtaatactttgtgaatctgctttttgacagtttttggaactatttctttttgtataaaatttatcagtgtcagtagcaagtatccatttgttatcaccaattttataccaaattttatcgttaactttttcttgagcataaacttttacagattgtccgactccaatgtattcgccagtaggtgattgattgggagctttatatgtttcacccaatccattatctgtaatttttgcagtgaacaaataatttgattttgtgttttgcacatttgcgagcctgatatagtgatgactaccaatgtataaatattttgtgccacgtattttcttagtgcgataggcttttacatatttgccttttttgagtaatttaacacctctaatacggttgcctttgtagttatagacataagcattatgcgtaagtcttacatttttagtgcttgcttccactacattagcttgttcgttacttgtaacaactgtagctgaaagcaatagagtggatgaaagtgtaatggtcgatagtaatttaacaacttttttcttttgtaacatattagttacctcctacggatattcattatttcaatttctaaattaatgatacatgatgtgaaaatgcatttcactgctgtttttctttgctggaattatatttatctctcgtaaatttataaaaaagtaaaagattgaaaagttaggtgcatcatttaatacaaaatataaactgaaatagattctcgttgaatttggaaactgtcaaatcttttgtgtaaatagttctttctcgtaaattgattttttaattatttatttaatcaaagtaggattctaaggtgtcctgaacctgaccaaagcatttatgaattcgattgaaataacggtcattgtagctcattgcctgaatgccaataaaagcatcaagcgactgttcagttggaaactctgccttaggcttagctttgcgcttgatcacattgttaaatgattcaatcatgttagtcgaataaattgaagctctgatctgcttgggatagttataaaagaccagcagatctggttctatgtctttcaagcttctgataacatggctgtaaaccttgccccatttggtatagaagtcatgcaggacagctgtggcttcttctttgtttgtctgttgatgcacctgtttgaattcgttcatgatcttttcacgatcgtcgacgcgtactttagcgcagatattgcgcatgacatgaaccaaacagcgttgaaaatgagctttaggataagtcctggccaaggctgttttcatgccaacaacaccatcagaaagaaaaagctcaacttgctttaagcctcgggatttcatgttttgaagcatatctgtccagacttcaatgttctcgctaggtgcaatgcagtagtcaatgacctccttgtgcccattaggcttgatgccaatggcaatatagactgcttcacgctcaaacgtttctcggcgcaaaggaaggtatgtcgcatccaaatagacacagaaaaacttgtcgcttagcttgcgcttgtgataagcctcaaccttggggagcatctgcttggaaatatttgatacttgagctggactataatgactgccatacattttctcaatcaagtcagcgatttctctggtagttacgcctttggagtagagcttgataatcgtgctttccaaaacatcagagtgctgcttgtagtcaggcagcgtgtgctgatgaaactgaccgttgcggtctcgaggcacttgcacttcaattggtccaaactgggtatcaaccttgcggaaataagcaccatttctagagttgccagtattccagccatttctggcatagggatcatagcccagaaaggcagtcaattcagcttctaacaagttattaacagcctgttgtagctctttgcgcaataaatcatttattttgtctggattgaatagagcttgagcaaaatctttggtaaaatcattcatgaaggagttcttctttctgtatgtgtttttttgttcaaaccaatcatacgagaaaggaactcctttttctaatgtttaaagaaataaatttaaggaatcattcatccttacacaaactattttacagtctcttaatttgacaagcaatatacagaaattatcaataaaaagtacgttttgctataccttttcataaacctgactacaatgagagttgaagaaggcgtttttgtatgacaaaagaatatgaaaaagaagtcaaagaagcagaaagcgtattggaggaccaaaagttaactgatagtgagatttcacaagaattgatttccaaagataatccaactgaaaatgtaaaaccatctgagattgatttcttgcgtaaaaagccaaatttgacaacgcaaattgatttcactttgttagctgatcttgctgggttatccaaggaagctaaggcagaagcggctgtatagataaaaattttacgtagaaaaaagaccggtttgaaccgatctttatcttataaaaatttactttaggagcgtttgtgaaacttagctactccccaactgattagatagaaagtcgaaatcaaaatgaattgaatttttaattctaaaatgaatagtggaaagtaaaataaaacggaaaacaatagaataatagcgtaaattccttcgaatgttagaaataatctgtttctttttctatttttaagtgttgctagtatcattttttcattcacaaagatccctcctaaaaattatgaaattaagaccaacttaaataaggaatagtccatcggataggaacacctaggagccaatgtccggagctgagaaaagtgttttttaacacaacggtagtaacaattgcaataactgcgagtactaccaataagattagtaatgtactttgtttaatttttgacatgattaatgcatcctcctaatattttttaaacttctattattttgctgggataatgaccggtaattgccaccacattactgtagcctcctcccttttttaatcatttagtcggtttggttaaatactactccttagtgactagaacagattaattttgtatcacatagtttacaaattatttgggccaagttttaattaaatcttgataaccatatttttgtacttcatttctaattttttgcgcttcctctttattgtttaaaaataaattctttaaatataaagcagcaatcttataaagcaaaaaatgtatggttggttttgattccatgatgtagtcaattatttttggaacatgcattaattgaagtgattttttagaaagttttctattatagcaaaccgctagataattctcgaagacacgcaagtatctttcttgttctaattcggagatatttttattgcttttcatctcgttaagtagtctattgataaaaaatgcaagggtatcttgttcccagagcggcattgtattagtaaaaagtcgcagtaattcaggattagtcatccagttttgtccttcgttaaattcaatgaatagatctttttttattttgggatcgatttgatttaatttattttttaaatatgctacagaaatcatagctcttaattttaaaatcttagagtgagattgtgacagaatttcttgatagcatgattcaatttcatcaatttttcctacattgaaggcttgttccattttattatttaaatctgattcaatctttttttgctttgaagtataggttgctcgcaataattggtaaaagtaagtaatatcaacatcatgttcaaaaagaatcgcggctaatttatctgcactaattctgctttttcccgcttctactttcgcataaaaaggccgagtaacaatgttagcagccatttctttttgagtgaggtctagattttgtctaatttttcgtagtgcttgtccaatagtcataaaaaatcctttactctaaaatattttcttctctacgatatatgattattataaatgatgaaaatataagcggataaattaaagagaactatggatatcggaacggcattaagacatttgagagatgatctaggtttgacacaaaagcaaatgattcaggggacgaaaataactgttagtcactattctaaattagagaagggacaaaacaggatatttatcgaaaacctagtcgagatattgaagcaacgaaatatttctttatcatattttgttgatcactatcttaatgatgaaaatagtgaaaaagaagtaaattattcagaaatattaaatattgctttttacgaaaaagataagatcgctgctgaagaaataaaacgacaaattttttcagataagagttctagcaatgaattgagagatagagcaacattaattgtggatatgatagacaaccagggacagagtaatgttgatgctcgaatcattaattctattttcaaacatgacaactggactcagtatgacgaggcaataatattattgggtaatattattagaactagtaatgtattaaatatgagtcctttggtattgactctaattagaaaatataaagatctagataaagaaaaaatcgaaaaacaaagaaggttagcaacggttggaattaattatttatttaattttcgaaagttaagtaaagagtttaataaaactgtgctaaaaattataagctggattaaaacaacatcgattgttcctgagttaggcattattcgagaattaaatgcatattttttagcagtttatgaaggaaacatttctgtctcaactaatatcaaaaatgtccttaaaatatcaggttatcaaaatcttgctaatgatttacctaattaatcccctgagaggggattgagttgctgtggaatgagaagtagataaaatcatagttaattaaatatgaaagagaggcatagtaatttgattattgttagttatccagttttacctgaataactctgagttcatacagtacgaggagatataaattatgaaaaaaagattttgttaagcctaagtttagtagtattaggaaatactttgttttttaattcgagtgtagcttctgcagcgactaataatagatattccgtaaataatacaattcgtcaggcacctaatactggcgatgttcctggtggatggggcattactcctggtcatacacattggggctaagtgatagaagcgatgaatgaattttcattgctctttttattttgggatgcgaattttatgaagaaaagtaaaatcatatttttaatagagcttgtattaaatattattgctgctgtttttctagtaataaataattcattcaaaaatttattagatgtaggcgttgtatttttactacttctattgcttatttggaattttttaagaagaaaaattgagattagtttaaaactatcatggctcaatcttatgatattaccagcaatttttacttattgcttaaatactgtagctaatgttttattggtaaaatatcctgttaaaagtgttttaatagctataatttatagtttgttattcttagtttatttgcttccggtagtaattactaatgcgggattggttaagaataagtatgctagagtttttattgcaatgtattatattgtgctattactttttagcgaaaacttacatatgaatgactacttatcatcctttgtaaattggtctcactctgaaattcttaatgggttagcgttaattccaatcatattttgcttatttaaaagttgggatattcgagcaaagcttaatcttaaatttaggcgatattcaaatatacagttaatagttttattagtagctgtattctttgctgcttggtattccttctttcatagctatgtttatattgcaccaactttttcgcaattattttggaattgggacttctcggaaattatcccaactgaacgagctgttttatggagtttaggagcgattttattcgaagaaggattccggtatctattaataattgtattgcttgaagtttttaaagtgcaaaggggtcaaattgactattttcttgagtgcgctattttttggattgatacattatgccggactacttgaccaaggcccaatatttataatttcaacgcaagcaatttttgcttttggttatggctgctttttggcgacactgtacttatattctggaaaattctggttagtattgctttcacatttttcattagatcttattgcattctcgctttctgcaggtggtggcggaatactatcatggtatggcaataatgatctcttgagtaatggtttgagcatggtttttgctttagttatgacattgattatgtttttaggtaaacaaaggaaaattatgcaagaaaatgctgctagattaattaatgcatgatgcatttaagatggtcgaaagatcatcttttttatgcaataaagtgtcatatataattgacacctactataaaagttgctattattttaaaaacgtcacatataaatgacatctaactagatgaataaagaagaattcaatgaatcgagtaagggaatatcgtaagcaaaagcaaatatcacaaatggagcttgctagacgaataggggtggcaaggcaaaccattaatttgattgagaatgataagtataatccatcgttagaattatgcctaaacttggcgcatgcattaggaacggatttgaatactttgttttgggatggggatgaagcaaaatgagacgagaaagtttatggcttaagtttgtcagatattggtatggcattgatagtaaattagacgagcggcaattagcagaggttgaacgaatcggtaataatgcctatgtaatctctggtatagtggaactgatcttactggttatcacgctaattatggcattgactattaaaagtgagctggctttgtggtttttacctttggcgattgcaattatgatgctgatgatgagtgcttatacttatttgacaatgcgaaaatttaaaatattctctgtcgaaattacagcagatgaacgccccaaagcaattcgtagaatatggataaaggctataatagcgggaataattggtgcagtttttggtacattaggtagcgcgctaggagcttcttctgtgcaaaataatctagtaaatgtgcttgatttttggccacaaggtttatggctaggcgtatgttgcggtgctggtagtgcgattggaagagtgcaacgattgaaagtaattaaagaagacgaataagcgaatcgaaagtagtcgatccgctttttttgctgaaaaactatataattaaagtaacaataaaatttacagcaaggcaaaaaggatgaaaaaacaaaataagactggctcaattggcgtagtgggtgccacggccatcggtgttggtggcatgatgggagcaggcctatatacattgctcggcttggccgccaactctgctggtgtttggctgccagtatcatttctaattggaggcattgtggccgcattttcagtttattcgtattcaaagttaggaatgaagtatccagatcgaggcggtgccgctaagtttttgctaaaagaattcggagatggcctgctagctggtgggatgaacgtcttccagtatatcggctggattatcgccatggcgttatatgcgaccggatttgcggaatatgcctgccaactattgggaaaatcaagctcaggctggctaggtaaggcaatcagtatcggaattgtcatcgtggttgtggcaattaatattatgggttcaaagcaagtggcacgtgcgcaaacggcaattattgcgtttgaattgttaatcttactgtcttttgtagcggtaggtttaactaagctgcatgtgccgacaattactagttcaaatagcggcaatattgtaggtatcctatctgctgcgggtttactttacgtaacttatgaaggttttggcgtagttactaacgctgcagggagtatggtaaatcctaaaaagcagttgccacaagcgctgttcttttcattagggatcgtcatggtgatttacattgtagctagtgtagtcgtggtgatgaccttaggcgttcaaggcgcagtagctaatcaaggccacgttttggcaacggctggtaagctagtattaggcaactggggtctgttcatcacttcactgattgtctgcatcttcgttgtgattttcccattatcagctgttggtgagatggccagcctagcctttttattggtgtatgccatggttaacttaggccacttgcgcattgcaggacaaactggggccaagcgctggattttgatttgctctgttgtattgaatctagctttgtttgctttgttgtttattcagacaattctcaaccacgaaactttaacttggatttcagtaattgctttgttaattattagttttttagttgaacttgcttggcgaaaaaagaataaacgcaacctgcattgattaggaaaaaaatagtaatttatgatacaaaaagtcgacttttgttccacttattgggtacaaaagtcggctttttgtttttttcgttgtcaaaacaatatctttaatattttaattcagatatactctctttgatcaagtttgaagtgagggaaaatgaatgaaaaagttattgatcggaagcgcagtcttagctgccttattaattaaagaaaatatcgcagtaaatgcggcaatagagcaaaacgaaacaacgcctaagattgcagttactgacaaaaaagagaagccaaaagaccagtctgataatagttttgcaggtcattatgaccaagagacaaattttattacctgggaaataaggctgaatcccaagaaagaaaaatatactggtgatttgaagttggaaaatttaattccagaaggcttagttctagatccagatacgattgaagtaattaagaatgataattttattcaaaattctagtttagttaaattgaagaaaaacaaattaacagctgaatttcctgctaagaagtattcagagagcacaattttgattaagtatcgaaccaaggtggaagcagagcctaatgagcctaattatcttcgggtgagtcagtcctttactttgggcgatgatcgagttcaagaatacgagcaagaaattaaatacgatcgaagtaataagaattttaacattgaagcgccacataaatctacgtttagagatgataatcaaatttcgttaattaaaaaatctaaaagtaatgaagaacgctctgaagattggcttaaacgtctagcagagctgattattaataaaaaagaaactacttcagataaaggaggtgaaaaagttcaaggacaggtcaaagatcaaaagcagcaagcttccccagaaaatacaaacctttcacgcactccaactgtcaaaggcttgactggttttgatactaaggctaacgaggtaaaatccacagctaaaatagattctgattcagtaaaaactactctagataaagacgagattaaggacaatgcaagtactatctcgcctaagtcgcaaaaacacgatactcatgtcacactccctaaaagtgacacatcagaaactaaggcaaaattacctaaagctggtgaaactgccggtgttatgctcagcgtatttggcataattttaataattgcagggtggacagttcgaacaaaattcttaaaataatctatatttgtactaaaatacggattttcaatagccaaaatagactctttcacgtattatttagatagataaacttgtatcatgaaagagaaacaaacatgccgtacactatttcagaaattattgttttattttttacttattcagttatcggctggctttgggaaaccttttattgttcgatcaaagaccaccattatgattatcggggatttctgtttggtccttactgccccgtatatgggttcgccgttactacaattttaatttgtaccaaagacgtgcgagataacctgctccttttatttatagtagggactatcgttgccactattttcgaatttgtggctagttggctattagagacaatctttcacatgaagctttggaattattcaaaattatggggtaacattcaaggtcgagtggccccaatgatttcattattttggggcgttggtgtagttttattagtaaaatttattcagccaatcattcagaagctcattaataatgaagaaaagataactcatggctggctagctgtgggtattaccattgttatgggtattgacttagtattaacagtaatcagtgtcgagagattccatactacaactaagatgtgggatgtgcatgttaaccactttattgagcgagttagaactaaagtagaaagtcatatgcctgagaaaggaaaattgcgggttggtgattggcaccactcagtgatgcagcactatgatgaattacaaccgcaacgattaagctggaatcataagcgctacttgaagagctttccaaaattaaaagttactgatgctcctaagttcatggaaattaagaaagaagtcttgaagaaagaaagctaactaacataatcttattttgtgggattgaaaaaagtcggatgatcatattaggtcatccgactttttcttatccattaattctatttggttcacgttttttactttttatttcggtgtagttatctaaaacgttggcatagcgtccaagggtgaaaaggtaatcagataatcgattgaggtattttaatacgtcatctgataattcctgttcatttaaacttaatttgaccaatataatagcaacaccatcaactcctgaaactactgaagaagaacatctgacagtaaaagatcatgtgggttcatcaactttaagaagaggattaccacaaactggtgaaaagaaatctactttgaatgcaggctttgcccttgctggcataggcttggctttgcttgcagggatgttgtttgatcctaaaaagaagcactaatactgaataagaattaagttcgttaaagatcgaatcattttgggttcgatcttttttagtaacaaaatttaaaaaatcccaccttcgtgaataattgaatactttatatatttcaatcgtccactttagtgggattgtattaattcaggatgatctttttgaatttcctgtttttgaagggcagaccaagtccatggaagagttttttagtcgcctagaaactataggcaaggcttggcataaagcctatgataccattgattccgatacagatagagtcattaagagaactaaaatggatgctcgtactacgttagacctactagaacatctatcacctgtacagttctcttgaagagaaaaagaatatcagcacgtcaccagtatggttcttagactatgatcaaaaaatttattgtactgatgatgccatcattggtcagatgcttcaaaccattaatcatgacattacccgacgcagcagtcgtagcttattacactggaaaattcttaaacaaaattgttccagaaatttttatttttgatggatattattttttgcttggttctaagcgattttatttatcaaagttaatagttctatgttatattataagtgttataataatgtaaaaattattaagcattgaaatatagtgcattatgatacgaggagaaagatcatgttagaaagagtcccaaaatatacactaagaaaactgtcagttggcttggcctcagtgatgattggatcaggaatactgatgaactctccaaaggtacttgctgatactattaacccaaatgaaggtactagtactgctgttcaaccttctagtcaagataaagataatagtgagccaagtactcaatctggtgctactcaagatgaaaacattgattctaacgcagctgttcaagagagaagcgacaactcagttactgaaccagcaaccacaactaatgctgaagaaaaagtagtggcaacaaatacccaagatactacgcaagataaagacaagcagacaaatgcgaatgaaactacgcaaaatactaccaatgtcgacaaaaaagatactgaagtaacgccgactaacgacgcaacaacagctacaccgaagacaaccgccaaggttaacgcaccggctgcaccaacagcaatgaaggcagcagctactgctgaaacaccagatccaacggttccagataactcagctaatactgctattatcaatgacaagaatagtttggaaaaaatttggcttgaaacatctactgcgcgggcccaggtctacactaccgttaagggaactgatcaaaaaatctatgtcagttcctatgcagaattcggtaagcgacttaattcattaatttttactaatcgctttgatccaaatagtctagaattacacattgaatatcaggtgttaaaggatagggttcaaaatttcattgtaaattggggagactggctccgactagataccagtagaattggtaaagatggtctaactttcactacagatacaggtgaaaaagtagcctatacgttaacaccaggatggggggaagtacaaaacctatgatgaatggcttagtgaaggccaagatatgagtaagataaatgctcttaaaattggcaacaatttaaaggccgggactaacttcgtattaaccgttcccctaaaatatattggtagaactgatggcacaaagcaatttaacaatgttcaagttgtagattacgggcagccaaatgctaatatggtgttcgattttattgaattacatccagagcaaatcgatactccagaagctccaactactgataaagagtcagttactaccggtatctataacaatccgttagctactgctacagactggtataaaacggagcatggtgaatatgttgcatactatacagctaaagggaaagatggtaagacctatgtaactggatatgtggctgccaatggtaagtctgagtcgattatcaatgttgatcagattgatctaaataccttggaataccatatgatttaccgtaatggtgacgaagaagtagcggccggtatttcagcaagctttgctgatggtaagactctagtggttgatgctagtcgtataggtgctgatggtatccgtttgaagagtcaacagggttggtcttataacaacgggggttatagagagaatactagtgggagactctattatagttgggaagattttcttaagaaccataacggatcggtagataacctcgttggcatcaatatgaatgcatccgctttcaagccgggcgatacaattgaagtagttgttcctgttaggtatattgggaaactttctgatcaagttcaatccttagaatttaaatctgaagctagaaaagatgtttcggttaaactctacttcacaactgtgcgcaaggacttaagccaggttaagcaggtagtcttgcttccgactgagttcatgggagaacaacctggtcaatcaaactggaagctggttaaggaaattgaaaaagatatgccaaatgggtgggaggccattaaaattagtaacttcccaacctataagggatcattcaatatggattcactaccaaaaggggacttaccatcggttgtttatggctctgcgcaatactttgttgacctccaagaaattcagaaaatttttgctaaccatggttacacggtcaagtatgctaacaacaacggtaaagctcaggaaatgccattctatggatacgttaccctgccactggcccttattgatggtggtggtaaacctgttgccccatctatctggacaatccaagttcaagctgtgcctgctattattttaaataaagatcaacactatgtggcagatccgaatgctaagccatgggacaccacttcaatgattgatgagatttatgctgctgatgacgcaggacagcggaagacgcgcgatcaactagaaaagttgccaaagacggacgtggatattagttatgaataccaagctccaggggctgctacagctgctccggttgataaggtcgacttgactaaggcgggggtatacactgtcacttacagtcatacttatgctgatgggcgagtagttaaggatagtcgcaaggtttatgttgatgatgttaagcaagaaaccaaggacattactcgaacaattattgtccacgagccaaacggaactgaccaaacagttatccaaaaagcaacattgacacggaaagtaattcttgatgcaactactggggaaatcaaatctgtgggtggatggtctactgctaagtgggaaagatactcagctccagaatttaaaggttacactccagccccggctcaaattgatgaaactgctgtgaacaaggacactcaggatacaactgttgagattagctatacagctaatgagatcacaaagccagaaaccaaggacattactcgaacaattattgtccacgagccaaacggaactgaccaaaaagttatccaaaaagcaacattgacacgggaagtgattctttatgcacctactgggaaaatcaaatctgtgggtgaatggtctactgctaagtgggaaagatactcagctccagaatttgaagattacactccagccccagctcaaattgatgaaactgctgtgaacaaggacactcaggatacaactgttgagattagctatacagctaatgagatcacaaagccagaaaccaaggacattactcgaacaattattgtccacacgccaagcggaactgaccaaaaagttatccaaaaagcaacattgacacgggaagtgattctttatgcacctactgggaaaatcaaatctgtgggtgaatggtctactgctaagtgggaaagatactcagctccagaatttaaaggttacactccagccccagctcaaattgatgaaactactgtgaacgagaacactcaggatacaactgttgagattagctatacagctaatgagaccccagagcaaccagataacagcaaggacaaaggtaataatgacaacaatggtggtaacaattcagatgcgattgtgccaataaatcctagtgacaataactcaaataattcaaataatgcaccaactgacaataagaagactgatgacaccaagaaagataatactggcaagaagattacaaaggagactcctaagaaggtaaagaataataagtctaacaagaccaaatcaacgactacttctaaatctaaccagtcttcaaaggctaagcgaaccactaaatctggtacgattagtcctaaggcagtcgctttagctaatactactgctggtctagctacttcagctaaggcaaatatggaaaacggtattgccaagaacaacagccaaaattctcaaactttgccacagactggtgaaaatgaaagtaaggtagcatttgccgttgccgggttgttagcagctgctttgggcatttttggtatagctattaatcataaaaaagaaaattaattagctaagttgaataaatcatacaaaaagacgcatagaatagcaatgtcattaagttaagacattgacgaaaatcagactttatgaaccgaattattttggctctttgtcaaacaccctaaagtataaaggtagatagaaacatgacgatgtttttatctaccttttttcttatacttagattgagcttgcggttgaacccttcaaggcagccgttagaataaggcagttttgctccattaagcacagcttttaggttatgtttaaaggtcaatagtgttttgtgcattaaagtcccaatttgatcttggcagttgattaataagttgagctcatgagtattgcccgtttcaacggcttgaataaagctttgcatcaggttatatgaattctctaaggtagtgctggtattgatgccttctgtaactacttgtgcttgagttaagcagtctttgtagtgccagttatagtgaggatgaactttttcaagttcatcaaacttcttcaagtataattttcaaggagacttaagcagctgatattgccgcgatcttttatcaaaggtcttcatgacttggaacctcagcgagttgaatgagcgcgtaagcatttgaatcatgtgaaaacgatcaatgacaatctgtgcattaggaaaacaagctctaacgatatcttgatagtaaaaattaagatccatcgtgaccgttttaacgttagctctagcttggagcgagaaacgaccaaaatacttaagcagcgtcttcttgtagcgagttctaagaatctgaacgacttgatgattatcaccatccaggcagataaagtgcagctggcggtaactcatcaaaagctaaatgagctggcaaatattcgtagctgtcaataaaccggtgtgaacagttgcccagtactctttgaacagtattaattgaaatattgttttctctggcaatgctggtcatagatcgatcttcagttaaagctgacaacactttaagcttagaggcattagaaatagaacagtatttaccaattcagactgagccatagatcagcgctcacaagtgcgacatttaactcgttgcttagctaatcttataatgaccggtaagcttgcattagctgtcggatagtgaatgttggtaatcaaatggccattatgtaagagatctagggagccgcagaaaggacaagcaggttgaagcaattcagcttcatagattttatgcttttgcagtttgatcgatttatagaaatcacctttatttataagaatttgtgtggaaacgatttttattgaagaggactatgtcctcttttttgcaataaaaaatcctgttaacagcttatcatatagataagtcatcaacaggaaaaattatagagccaatattttgagattaattgataggggttgaaaagtaaattttatttgttatagaaaatatagaaaaaggattgttcaagaaattattttacgaaacctgcagtgaaccaagtgttggcactaggcttaagtgaccagccagtgaccttcttgttaacagcagtgattgagtattggttggtagttggcacaacgtatgcttcatcatacatccacttttgccacttcttgaaggcattagcacggtaagtaggattgaaggccttctctgagtcgatatcagccaaaagcttagtttgcttaggtgaaacgaaacgagcaaagttgtatggtgcagcttcattgtaaaggtcgttaggggatggttcacttgaaagtgaccaaccaccttcgaagacgtcgattcttggatcgtcagattgaacagcttgtacccagttgttgaattccattggacggccgccgacaaatttaacatccaaaccaactttcttccattgttggatgtagtttctccaaacaggttcagcggtagttgagttgtttctaacagccaagttaattactaacttcttgccgttaggttgaactctgtattcacccttcttcttgtagccggctttatccaataattcgttagccttcttcaagttgtatgggtaacccttgattgacttgtcagtataatcaccaaattgttcagggatcaaagtgttaacgcggaaggccaagccgtggtagtaacgtttagcgactgcatcaacgttcattgcataagccattgccttacgcaatgatggattgtccatcttggagttcttgttttcaacgttcttgccagacttcttatcccatttacctaccttaaagcctaagtagttgtaggataggggaaccttaccaatgaagttggtatcagtagcgttcttaacatcatcccattgggtgttaactacgccagctatgtcgaacttgtgactcttgatggcttgagtaactgagttggtaccgatgactgtcatggataccttttccaagtttggtgtaccacgccagtaatgcgggttacgttcccaagtgacagattgaccacgaacaagcttgcttacgcggaatgggccgtagaagagtggttgttttctaaccttgtcactagacatcaacttggagaatggtacgtcctttaagtaatggtaaggttcagcgtattcccagaagtaaccgttacctgattgaagcataccaggcttcatttgtttcgaccttgcggccatcttcgccatcaggcatctcaataccagaaatcttcttgctcttgccttcgtgatattctgctaaaccaacaatgtcggcaagagaatcggtataacgttgtgacttggagtctttattagcgataatttcataagcgtattccacgtctttagcattaacttgcttgccgtctgaccacttaacacccttcttaacctcgatagttacggtcttggctttacggtcaagcttaaaggtagcagcacctttattgttaatcttgtattgatcgttgactgagaataactcttcttgtcctggctctgcaacttcagtgtcagtggcagtatcagataattctggcaagaaaataccagtgaagggactatcagattcgatagcataatttaaagtgccaccttttttaacacttttcacaggaacagtttgactgaatttgtgatgtgtttcatctgcattattattttttgaatttttattattaccacaggcaaccaaacttaaagctgccccagaaacaagtgctaatgcaccaaaatatcgttttgctttactcattcaaaaagcacctccaaataaattaaaaatatttgagttttattctatgatattaaaatgaaaaaaaatagaaaaatgaataaaaatgtgaaaaatattatttttaaattatttttgaagctaagattagttttctttcttggctaattaggcatagaataaggaaataacagctttttatgttggaggaaaatatggatacagcctggcaaaaatttaaaaataatattccattacgtcgatttgtggtactgctattaattattgcctgcctttatgaaatacgagcaatgatgaacacagtattattaacttttatttttacttatgtgattgtgcatttaattcatctagtgcagcggtattttcctaaaataccaacaggtctaattgttgcggtaacatatctaattatcttggcgctgctttatttcgtggttaccatttatttgcccatgttagttggccaaatatctaaaatggtaaagtcagtgatggcgttttatgaatcaaatgaatcatcgcgcttagccagccatgtaacgcgttatatcagtaaaggtgagattgttacgcaggcaaaacgagttgggacttttgctctgcatacggtgaccaattttggtagtttaacaattgctacctttatgtccttgattttaagtttcttctatacgattgaattagatagaatgattgaattttcaaagttatttgttaaaagtggttactttaaatggctttttgaggatattcgctattttggtaaaaagtttaccaatacttttggtgtcgttttagaggcgcaattctttattgccatttgtaatacggccttgacgatgattggtctggcatttatgcatatgccgcaaattattgccttaggcttaatggtctttattttaagtttagtgccggtagctggtgtgatcatttctttgattccattaagtattatcggctattctgttggtggcattcgttatgtgatttatatcttcattatgatcatgattattcatgcaattgaggcctatgtgttgaatcccaaatttatggctagcaagaccgaattaccgatcttttatacttttttagttttgttagtagctgaacacttctggggtacttggggcctgattgtcggtgtgccgatcttcactttcttgcttgatgtcttagggattaaatcggcgaagaaaagtaaaaagaaagcgagtaaataattgagagtacttttgacaggtgatagcattattgcacgccaggaaggaaaaaatgaaccgcaccttaattggaatttacaacagcttttgcctgagattgaactagaaaatacggctgtttcgggaattaattctggggcattttttgccaaattaaatgaattagtactaagcgtaaagcagtgcgataatttggtgatcttgctgggaaccaatgatttggctatgcacaaacaagtgccagcgaggcaatttaagcaaaatatggaaattatttcctcggcaataatttgtcaatattacccaccacatgttctgcttgtttcgccgccagctgttgatgaagctaagcaacgtgtacggaataatacgttagtagcggaatatgctcagatcgtgaaagaagtagcacatgagtatcattttcgttatgcagatctggcacaagctatgcgggatattggcgatttaagcgagatttgtcaaggagtaaaaaacgatggacttcattttggtgatcgtggctatgagattttaggaaaactaatcgctgaaaatttgaaacaaatgtaaaaaggaccgcaaattgcggtcctttatttttcgctattttaatgttgcccaaagcaagcttccagctagcgcaatggccaagaacggaatgagcaaataggcaaaaaagaaaaacataattcctacgactagtaaaaagccgataattttaatgaggccaattcctaatttaaaaaatagccagagtaagagtaatgttaataataaagaaagcatattaatacctccataaatctatgagagtattttactaccaaattggacgaatagaatagtaggaagattaatgctttagaaaaatttagttaccggtaacaagataaatcatattgaaagctctttctgtaaccgctatattttaactattgaaagcgatttaagaaacgagaggaaaaataaatggaggagaaaaaaactgggttacctacgctagctagtacgacaatttggatgattagtttggggtatttgggtgtgcaaatcgcctttactttggaaacatcacagatgagtcgaatcttccaaacattgggtgctgatccgacaaaattaggctggttctttattttaccgccgttagctggattggtagtgcaacctggaattggatcattatccgatcgaacttggattcctaagattggacggcgtttgccatatttattagtcggtatgatctttgccgtaattactatgattttgttaccaaatgttggtagttttggtctaggctatggttcaattgaggctctaatatttggtgctgttgcaatcgcgatattagacgtggcatcgaacatggcgatgcagccatttaagatgatgatcggtgatatggttaatgatgaacaaaagtcatacgcttacgggattcaaagcatgttgtccaactttggtgcggtaattgcggcctttttcccattcttattaactagtttgggtgtagccaatactgctaaaaaaggtgtggtaccacaatcagtagttatttcattctacgttggtgctgctgttttagtaattacttcactctttactatttttagagtacatgaatatgatccagaaacatatgcgcgctaccacgggattaaagaatctgataacaaagaaggtggcggctggattgaattgttaaagaaggcgccaaaggtcttctggcaagtatccttagtgcagttcttctgctggatttcattccagtatttatcaacttacgccactggtgcgattgcgcaaaatgtttggcacaccaccaacgcttcttctgctggctaccagattgccggtaactggtttggtgttttgactgcagtgcaatcaattgcggcggtaatttggtcctatgttttggctaaggtgccaaacaatcaccataaattgggttatggccttagtttattcttaggcggggtaggttatacttcaatcttcttgattcattcacaaagtcttttgattttagcatttatcttgattggtatcagctgggccggaatgaatacctacccattaaccatggtatctaacgccttatcaggtaagcacatgggaacttacttaggtttattcaattgttcaatttgtttacctcaaattgtggcatcactgctcagtttcttaattttcccaatggtcggcaattccatgccagccatgatgttaatcactggtatttcaggcttcttgggagctttatcagtcttagcaattaaggaaacctacgtaaaatagaatatcttctcattaaaaaacacactacaatgtgcaattatgcatgtagtgtgttttgtgatttatctatgtagaaaaattcgccttcgtctttgaacattttgtaggtttctttgatcattctttcagggattgcataagattggacgaatgcaattgggtcatagaaattatcttcttgtccgcaagagtattgatagatcagatgcaatccataaatatcggcatctctttcttcgtcatcaaggccgccataatcaagacaacaattatattgttttaagttgggcctgcaatccatgatatgcccaatttcatgagcaactgtaaatggtacttccggtgaatggtggtgccaattcatgttgatacagatttctcgctcatttttaaatgaaagagagggattattgggatctgattcaaaaaagacgtaaccaatatcatgctcataagcataattaaataaatacgtgattagttgattttttctatagttattgtccactgccatgttttctagcttctctctctttgatgtctctcttcatgagttctcggaccatgtcaagatattctttaggaacaggatgaccatagtatgaatagggcacctcgtcttccaaattcacagtgtcctgcaaacgtggagcagggtcatcggtaatgccacttaaatagtctattgatgtatgcaaaaccttagcaactgcacctaaggccataataccaggttttctggttttccaattgtagatacttcttttgcctagtccagctttgtcatttacttctagtaaagacatttttctttttttcgctaattcttttgtacgctcaaactcaatcatgacgaggttttcttcactttctaaataaaaaaagtatgctaaaaagcatattttaacttgacatagtattcgtataagcatattatatgaactgtcaacaagttaaaaacaatctaatgaccagaaaaattctatgtggtagtggaatcaacggcactagtctgttttttatacccttattgtagtatattgacgtattttggtcaatgactaatatgtcaatacttaaattaggcctgcttgttgaacattatcaaacagaggtgaagtccaatggacattcgttaaccccctctgatcatttgatcaaaagagaggtgatttatttaatcatggatattcatgattacgtcgagctgattactttggctttatgggtaattagcgtagtaggtattggcatcttgagcagggttcattttaagaacaagcgcttagagcaattccgcaatactgcagacaacttgatgaaaagctatgtacgcttatacgacaaggaaaatctttctgacgaacagaagattaatcgcgttggcaatgcagtagtgaacagtcttgaggcaaaaggcttcaagctgaacaagcaagaagtgcaggatatctttgcggaagtagctaagcaaatggatgagcagactcaggataagtagtaataatttttaatttttcggaggttttgttatgtacgaaacatcaaatatttcaaataatggtgagttttcattaagtattggtcatcattcagttgtccaaaaaggagatgtaggtcaaaactatatttacgctttgcagttacgtgataatcaaaagagtacttacgtcttacgtagaagtaaaaatggtggtaattttaacactattttagatttacacggttcagcagctggtcatacgcagacttggtcctatgcaggtcctaataattggtttattggaactaagccgagtggaagctgggctattcaaattgctcgtgtaaatattaagactaatggtggtcgtcatactacacactatgattttccacgtttagctcacttagatcgtgccggtaatgtaccatatactggtagtttagtacgagcagaggcagcggtttctccagatcacactaagttcttattggttacagttgataacaatggtaagggatattttactatttataatctggctgctattaatgatgcacttgatagcgtgcaatataatagtggtgcacagcgttattatgatattggtaaaatttcagaatctgatgttgtaaataagtttactattgatagattgtattcaggtgacgttaatgataagagctatattttacattcgcttcaaggctttgatgtagataacaatttaaatgtatttatttcaagtcaaaaagctccaattattgattcagcaacaggtagattcccagcaggaaatacatttcataaagaaattttggttattcccgctaatgctagagatgatcaaaatcaatggactaatgtaaatctaagcgcttctggggtaattgataaaccaggaactggtcgacacactgaagttgaaggtattcaagcaatcgatgctaataatgcatatttaactgttgcatatcatattaaaaaatatgattctttagctggtgaatataagtcatacactgattacagtacaatttataaattgtcatggtattaattaagcgcataaagttggataaaaaatcctaaaaagaagatcgaatgttactgcaagatgtaatattcgattttttgtgttttcaaattaatttatgtaaacttataaaactctaattaacgtaagggggtataattgcagtgtgagaattaaaaaggatgattatgatgaagaaaaataaaattgcattaatttctgcagctgcattgatagccgttacacctttaacggtttggactactcaacctaatgaagtacaggccgcaggcacttcaattagaaagactattatgcatactgcaattggttatgatacaaatggtaggaactcgggcataaaactttatccatataaagttattaacgttgaccagattcctgtccgtattaatgaccaacaatattacaaagtaactggtaaatacttatatataaagcctacaaatatcgatggcgtaacacgaaaaattactcataacacttatatttatagtagctctactaaacgcactttttttaacggaagacgaaaattaaataaaggtgaaactattactacatatggtagttcttacaaatttaaagatggaaaaagttactttagaataggcggcccaagcaagcaatatgttaaagcagctaacttaagttcagtaattaaaagcaatactgcttcaggatcaactgatgtaaataggcactatgccaaagaaactatagtaacagttcatgttagaagcacatataagaagacagcaccaatatttacttttgatgaaaatactactgctgagaataaggctgtgattgtaaaaagagttccaaatggtactaagtttacagttgatcggctagaatatggcaaaagagctgacatggtagcagccaaaatagcatcattcaatggaaatcaggctatttatcatattaaaggtactaataattggatttattcaattgatgttgatcctgagaaacagttgttagagcaatattacaacaaataaattttaatttcagttaaaatgtcaaattaagcaaaaagagaatcctgttccgttgagcagggttctctttttggatattcattagtaaattgtttattttttgatctagaagaattagtcttttacaacatccttaatgttcaaccattggctcttgttgatcttaacgatcttcttgccatcagcctttttgacatctttggcagtgtaggttgaacccatagaaactttttgagtagttttgtgaccttgagcattcaaaacgttaactttttgatttttggtgtctttaacagtaacaaaaatcttgtcacccttcttgattgaaggatcggttggcataacttgtgcagttccaagcttaggagcttcaaaactagcagcttgactaactgaagcaccaacgctcattaaacccattgaagcaacgacaactgaaacaaccttaatcattttctttgataacataatgaatacctcttatcacttatctactggaacttttcgttcctcattccgtacaattcttattatataacgcaaggggaaaagtacattttttaggaaaatatttttactgggtaaatgttactagaataacgttttacggaatttcgtaaaaagggcagaaaaaaacagctattcattttgaataactgcggagatttttggtataagtcccttaacgatgacctcggctcttattataataagaaaatccgcaaattcacagtgttcatattatagctgtcgttcactcttaacttataatcctaaaataacgttctaatctgtgaagtattgcagaatatcctcctcagttaggcgttttttgtcgtcgcctttgacatcaaaaacgattctaccattgtttaaaatgatagtgcggtttccgtatttgattgcgtcttttaattggtgagtgatcatgacacaggttaaatgctcttcttgcacaactttatcagttagttcaagcaattcgcggctagtatttggatctaacgccgcagtatgctcatctagtaagagtaaatcagggcgcttaattgtcgccattaaaaaacttaatgtttgtcgctgaccaccagaaagattacccacaaaagtatttaagcgttcatttaacccattagggagttgggccgcctggcgtttaaattcttgcatatgtttatctaggcctcttaaacgcagaccgcggtgttcacctcgtttggttgcaagtaataggttttctgcaacagtcattcgcggagctgtacccattttaggatcttggaatacttgggcaatatatttagcgcgttttacttcagaaagattggttaaatcttggtctttgagcagaatttttccgctagtaggaaaaatagagccattgataatatttagtagcgttgatttaccagcaccgttggttcctaaaagagtaacaaaatctccatcttcaagttttagattaatatttttgaggatttgcttttcttcattggtaccagcattaacggtagtggtaatattttgtaaatcaagaatagtactcatggtttttcaacgcctttctttaataatttacgagtgcgaaatttttgttcaaataaaggtagcatcatacaaatagcaagaataatagcggaaatcaacttaaagtcgttggtactaaagccaagttggaggactaggagtaagataaggcgataaataatactgccgataacaactgctaccaagcgggcggttaaacttaaattgccataaacgacttcaccaataatgatggcagctagtccgataaccatagtaccgatacccatattgacgtcggcgtagccaccattttgggctaaaaggccgccagctaagccaatcaagccattagagagcattagacctaagattttcatattatcggtattaatgccaagtgattgagccattttttcgttgtcaccagtggcaataaaggcttgaccaagatcagtatcaaggaaaactgctagcaaaacgatgacgataatggcaatgatcaaaccaacaacaatagtaggaaaattgatcggtaatttttgtaaaagctgaccgtttagtaaagtatttttgttaagtaaaccaacattagccttgcctagaattctaagattaactgagtagacgccagtcatcgttaaaataccagctaaaagaacaggaatttttcctttagtatatagtaagccggttactaagccagtgaccatgccagcgaagaaggaaagaatggtagctgctaaaggattgacgccatgaactaaagcactaacacaaattgcggcaccgaaggggaaggttccttcaacagtcatgtctgggaaatttaaaattctaaaagttaggtagaggcctaaggctaaaataccccagagtaagccttggccaatagaagaagtaattaagctcatttgataattcgtcctttcttttgggcagcttgaattacactgttaggaatagtgatgtttaattcatgtgctgctttttcattgattactgtttcataatgggttacgcgtctgactggaagagcagcagggtttttaccatgtaaaatttgtcctgccatttgtccagttaagattcccatgtcgaattgactgacacacctggtagcgagaccaccacttttaaccatagtatcggcagcaggaaaaactgggatcttggcactgttagtagcctttaataaggtggcaattccactagctacagtattgtcggttgggacataaactgcttgaaccttgcctaccatggtttgggcaacttgttcgatatcattggttgaagtgatagtgtaagggataactttaagtcctgttgcttcagctagtcgtctgaattcacggtactctgatgctgatgaatcatcacttgaggtgtaaatgacaccgatgtttttggctttaggtagaatttcttgcattaaggccagctggctggcgattggctggcggtcctggacaccggtaattttaccgccgggatgcgctaggctttttactaaatgggccccaagaggatcgctgaccgcgcccataactacagggatgttgccagaagtattagctagagattggacagcaggagtggcaattccaatagttacagtcgcattttcctggctaaaacgatcgctcattgatttcagattactttgatcaccttgggcattttgaaaatcaattttaagattttttcctttgacatagccttcatctttgagaccctgaataattcctcgatgaatctgatctagagcggggtggctcattgtttgcaagataccgacagttggcgttttcttttccgcatttttcttatttacttcactgacaaatgcaactgccagaaaagcaaaaagagcaataattgttccgattaaccttttcattctttttctccttcaaacaaaaaaggcacttccttttttcgggaaatgcctaaaacaaaacccgcacgttattttccgtgcgagcaatatttcttgaagattttaccagcacagatacgatcttaatgagtcgcatctgtacttcacgaacagaaacaactctagtgctggaattgccaacgattgattgctgtaaatttaatcatgataaaatcttcctttcgttcaaatttgttagctaaattttaagtaattatgagaaagatgtcaaatgattttttgttagatttatttagttttgaataatttttaaaatgctataataattattccggcaaccatcataaaaagaagggaggaattctcttgcgctatcaacaaataatttttgatgtagatgacacaattatcgattttgcggcaactgaagattttgctttacatagcttgtttaacgctcatcactggcctttatctgcggaattgcagcggcagtatcattcttataatcaaggactttggcgccaacttgaacaaggtgaactaacttatgaagagttaagtgaaatgacttttcatgattttattttggatcattttggcattgagattgatggcaagaaggcaatggatgaatatcgttcatactttggtgaagcacaccaattattgcctggggttgaagatacgttgaaatttgctaaaaagcagggctataagctgaccgttttgagcaatggtgaaaaatttatgcaaaatcaccggttggagcttgctggggtgaaaaaatattttgacttaattgttacgtcagaggaagcccattattctaagcctaatcttcatgcctttgactatttcttcagtcgaactgagatcggtcctagtgagacagtcttttttggggacggcctacaatctgatattttaggtgcagaaaaatatggctttgatagtatttggtacaatcatcgccatcgtaaaaataccttgcatttgcatcctaagtttgtagtagaaacttatccagaattggttaaattaatgcagaatgattttgagaagaagtactaatcattatactttttgctcttcaagaagatgccccaaccaatagttaataagctgacaaaaattattaaaatccaaaagccgttttcattttctttacctggtaagccgccgacattcatgccccaaatgccactgattaaagcgggaagagcaattaccagggcagctgaatctagatatttcattaaatgatttaggtgactgtccatcatggcggtaaagaggccgctaatggaattgagcaagtcagtgtaaacgtgaatcattttggtaattcgtttttgcttggtcatgatacttttgacgcgggcttgatttgctagcttgttttctactaaataattaccaaattcttctagactaggtgtttgatcatctaaggtatgctttaagtaaactagctggcgagttaaatctgttacttttttaattctttggtcttagttgttcttcttgcagcttgatctaaatggtcaattttttgtttaattgttactaattctgcatgaagatgcttgatttggatacacaggctttgaaaaattgtttcaataatattttcttgcggttttaattctgaaagacttcttgttgtgccaataaagagatgattttggtcaaaaattgtaaaaattggaattagctcttgttcaattggcaagtcattacttaatagatcgaaactcactaataagtgaccattttttagtttattagaatcaatagggataaaacgagcaacctcaatcgaggaattagggtaagtgaaaattgtaggatctagatcccattttttgattaaatgatcgatatcgttttgcgtcaattgatcttttaaaattatattctgactattagtaagcatatttgttcacctctgtttcttttttagtttaagattaacatgtaatgttttttagactgaattaagttgacttgaaaatatgtttttttaaaaaatatagaaaggtgagaatatggaattacattcacttactgatacttatactttgaacaacggcgtaaaaattcctgtaattggtttcggtacttggcaaacaccaagtggagaagttgcaagagaatctgttgaagccgcacttgaggcgggataccgtcacatagatactgctgcagcttacggcaatgaagaaagtgttggcgaagcaattaaacgtagtggcgttaaccgccatgaattatttgtaactactaaattgtggaattccgatcatggttatgacaagactaaaaaggcaattgatactagtctagaaaaattagatttagactatcttgatctttacttaatccattggcctaatcctgtagctatgcgtgacaactgggcagagcttaacgctgaaagttggcaggcgatggaagaagcagtgaaggctggcaagattcgcgcaattggtgtatccaactttagaaagcatcacctggatgaattaatgaagactgctgaaattaagccggtagttaaccaaagttacttgaatccgagtgatttgcaaccggaagtaacggccgcaagcaagggatatgatttgcttaatgaggcttacagtcctttgggtacaggtggtttattaggcaatgaggtagttaatgcagttgctgaaaactatggtaaatcaccagctcaaatcttgattcgctggtccttacaacatggctttttgccattgccgaagtcagttcatcctaagtatattgcggctaatggtgatgtctttgactttgagattagtccagaagacatgaagaagttagatggtttacgtggtgcaagtaagttggctaatgatccggatgaggttaacttttaatttaatttggaataaagaaaattgaattatcacaagaagtatcttatttttgaagtaagatacttttttattaggtgagacaatgaagaaaattacaacaggaattgtagctcacgttgacgcgggcaaaacgactctttctgaggctctgctgtacaaggcaggaaatttgcggacgctaggaagagtagacaatggggatgcttttttagatacagatcaattggagaaaaaacgtggcattaccattttttctcatgaagctaaattaacgactgatgatttagaaattacgttgttggacacaccgggacacgttgatttcagtgcacaaacagaagaaacgctgagtgtacttgattatgctatcttggttatttcaattacagatggtgtaactagttatactcgcactttgtggcatttgctcaagcgatatcaggtaccagtttttatttttgtgaataaggttgatgcgataggcgctgatcgagggatggcgttggttgatattcaaaagaacttaagtgagagttgcgttgatttttcgaagattgatgatgaattttatgaaaatgtggctgccacagatgatgccttgcttgagaagtatttggatagtggtgccatttatgatcaggacgtgcagaatgcaattgtgcagcggaaagtttttccaatttattttggttctgcgttgaaattaacgggaattacggaatttttagctggttttagtaaatggactaaggaaaaggaattctctgataagtttgcggcacggtgctttaagatttcgcatgatactaaaggtgaacgcttaacttggttgcgaattttgggtggtagcttaaaggcaaagactgagctagctggtgagaaaattaatcagctgcgtagttataatggtgaaaaatttgtaactattactgaagcagctgctggagagatcgttgctgcaacaggattgactaagacgtatccaggacaaggattcggcgtgggggatgcaccaactgcactgcttaagccagttttgacctataaagttaatccccaggataatgatcttcacgcttgcttaaaagctctgcaaaccttggaagatgaagatccacagctgcatgtgacttggtccgaacatttgcaagaaatccacgtgcaagtgatgggaaagattcaattagaaattttagaacagttaatgaaagaacgttttggtttgaatattgtttttgaacagggaagtattctttatcaagaaacaatcactaaaccaattgaagcagtaggccactttgaaccgctacgtcactacgcggaagttcatcttttactggagccactgccacgtaatagcggtattgtttttgaaaataaatgcagtttagaagttttgactaaaaattggcaacatcaaatcatgacggcattgaagtctaaagaacatcttggtgttttgacagcttcgccgattacagatatgaagattaccttgatcggtggtaaaggctcaattgtacattcggttggtggcgatttccgtgaagcaacttatcgtgcagtgcggcaaggtttaatggaaaaaaagatacgccaacaaactattttgctcgaaccgtggtatgatttccgcttagaaataggaaaagatcaggtagggcgtgctttaaatgatattcagcgcatgaatggaaaatttagtacgcctgaaaatattggtgaacgaacagtcatatccggttctgcaccggtagctgaaatgcaagattatgcgacagaagtgcgcaattatacgcatggtgaaggtaatcttgaatgcgtagtcagtggttatttgccttgtcacaatgcggcagaaattattgaggaaaagaattatgatcccgtttctgatctggagaatacgcctaactctgtcttttgttcacatggtgcaggtcacaccgtcacttgggataaggtgccagagactgcacaatatccttatacttatccattagattagcatgataccatgaattgtttatcttgttacatgtgaaacattaaaaatgcggcatagtgcttttcttattaaaaagtgcaacttgaaataagcgaaatatttgactagttatgaaagaaatttcattttattagcaaaatactgctagaaaatcgcttgcatagtaagataaaggtacgatagaaaggtgataaaacatgacacaaataccttttaaagctgtagcggttgatctagatggcacttttttgaccgaaaaaaagacttttgatcatgcgctatttgcaaaagttttacgaaaattgcaagctaatcaaataccgtttatctgtgcaacagggaaccaactaattcgttcgcatgaatattttgacgagtttactaatgaagtagattatgtgtctgaaaatggggcaattctagaagccgatggcaaagtatttaagcggattgcgattgactatgatactgcacaaaaattgttacattttattcaaacagaataccctgaagcaatcattatggttagcgcacagcatcattgctatattttgacgagtatggatcaagcggataaagacgacattagaatttattatcgtgatgttcaggaaatcgatcagtttactgacattgatccagccgatgcgatcttgaaggtttgtctgacagctgatgatgaactggcgcaggtgattcaggatcggtttaatgaaaaatatggtgactgtattcgcggcactagcagtggtaatatgacaatcgacttggtgcataaaggcattaataaggccaagggcgtagacgatatgcttaagcattatggcattgcgcaaaaagatttgattgcctttggcgatggcgaaaatgatattgatatgcttaaggcatgtggctatagttatgcgatgaaaaacgccaatgcgaaggctaaggcggtagcaaagtatgaagcgccaacgaatgatgaaaatggtgttttgaaagttttggctaagtatttagatattgattaatttaatacgcaaaaaagacttgagaagtaattttcccaagtcttttagtttgctttattaactgctctgaaaatattaagtccgctaattagaatgatgaatccacaagctaaaatcagaaccgtttcaccagagctgtctaacaaaattccggcaacaattgaactaatcggtccaccaatagaggtactggtacgaatagtagttagcactctgcctaatatttcatcgtccgcagtaatctgaatcaatgattctgccaaaatattgtgaatactcgtcattagcccaaataagaaaattagtcctgtgaatatcaaccaattgttactgaagaaaattatcaaaagtaatggtactgcactagctatccaagtaaaaccaattgtttttacccgtacggataatcttcctgcaatagttgcacctattacaaagccaatcataaaactgatatagaacatactgtatagtcccgcttgaccattttgttgagcaattcttggcaacagaatggccattgctggcgtcacaaaagaatacaggattgaggaccagaagtaatgacttaagaaataatttgttttaataaacttatagccattaagaatttgattgaggtattttgcctctgcttttttgactttaggtctatctttaatttcttttagggcgtaaaacagaaaaacaaaactgattaggctcagtagactgcagatcaacattacattagctgaaattaaaaaagttaataaaaatccagaaagagcagttcccgctacattcacaaactggtcgatgttgctaactttagaaattagattatttaattcttggtcatcagccgttgtttcttttaaaatagcccggtcagctggattaaaaaattcatcgcagacagatactattcctgcgcagattaatgccaaaatataacttttgctaagttggtaaactgcaattgttgtggcaaataggaaaacagtttgaacaagaattgaatagtaacttgtccttttgaatgaataatgatcgataatggggccgtagaatattgataaggcggcagtggtggaaaagatggcttccgcaattccgacgacaaaggaacttttggtggaagtttgcagccaccagataaagaccatgctgaagagggaattagctagtccgccaacggcacgcgagaaaaaatatgatttcttttttaacatttgaagggttcaccttactatcatttggtcaaaggtatcgtatccacaccatgaatatggatggtttctaataattttatctatttttttaaatacatatttagactcattaacaatgcttgctctgttttgaatttttgacggataaattggatcttcgaaagtgatcttgattttgtatttttctgtcatttcagtatgtaagataataattggaacttgcattttattgcttacccaagagctacctaatggcattgaaacacgtgctcctaataaatttacagtatgttgtggccctagtcccattgaaatttctggtggaattgctactactttgccttgtctgatgtcttttaacgcttttcttaatattaatgggtatggaacaccataactatcaacaagagactgtaaaatagtttgtgtaaggatgaatgattccttaaatttatttctttaaacattagaaaaaggagttcctttctcgtatgattggtttgaacaaaaaaacacatacagaaagaagaactccttcatgaatgattttaccaaagattttgctcaagctctattcaatccagacaaaataaatgatttattgcgcaaagagctacaacaggctgttaataacttgttagaagctgaattgactgcctttctgggctatgatccctatgccagaaatggctggaatactggcaactctagaaatggtgcttatttccgcaaagttgatacgcaatttggcccaattgaagtgcaagtgcctcgggatcgcaacggtcaatttcatcagcacacgctgcctggctacaagcagcactcggatatcttggaaagcatgattatcaagctttactccaagggcgtgaccaccagggaaatagccgatctaattgaaaagatgtatggcagccattacagtccagctcaggtatcaaatatttccaagcagatgattccaaaggttgaggcttaccacaaacgcaagctaagcgacaagtttttctgcgtctatttggatgcgacataccttcctttgcgccgagaaacatttgagcgtgaagcagtctatattgccattggcatcaagcctaatgggcacaaggaggtcattgactactgcattgcacctagcgagaacattgaagtctggacagatatgcttcaaaacatgaaatcccgaggcttaaagcaagttgagctttttctttctgatggtgttgttggcatgaaaacagccttggccaggacttatcctaaagctcattttcaacgctgtttggttcatgtcatgcgcaatatctgcgctaaagtacgcgtcgacgatcgtgaaaagatcatgaacgaattcaaacaggtgcatcaacagacaaacaaagaagaagccacagctgtcctgcatgacttctataccaaatggggcaaggtttacagccatgttatcagaagcttgaaagacatagaaccagatctgctggtcttttataactatcccaagcagatcagagcttcaatttattcgactaacatgattgaatcatttaacaatgtgatcaagcgcaaagctaagcctaaggcagagtttccaactgaacagtcgcttgatgcttttattggcattcaggcaatgagctacaatgaccgttatttcaatcgaattcataaaggctttggtcaggttcaggacaccttagaatcctactttgattaaataaataattaaaaaatcaatttacgagaaagaactatttacacaaaagatttgacagtttcgtagaaaatgaagccaaacttcttattatgcttgactttacgtagaaaaagacctaaaagtgtctaacttttaggtctcagttcagtgtcaaaaatgacacctttttttattttgaattaaagtttatcagcaattatatccattccattttctctgagaaaatttgatattgttttggctttctcaagtttattattgagaatagattcatagtaattagccattattttagcaaaacaatttttaggatcaattgttaaagaattcagtattttaactgaagcatctatattagtatttataatacgttgctttttttttatgaaataacttaaataattaactaagattgcggatattattttttgcttttcttcaggaagtgaatttatattatgggtgttctttataatattttttacaacagaatttatttcatttggatcaaaaatggacattgaaatagcaaatagtcttaagctattttccgtccaattatctgtttcgaatatagttttctttatgtattgtttttcatcattagaaatctgggctaaagtatttgaaattgctgcttttataataataatttgtgccctaatattatccaaatttagttcactattgtttctatcgtttagcattttttctaattctgttattttcgacaaatctttttgatagtaagctgtgtgtaataaattatcacaatcaattttagatatgtgatttttattagtattattttcaacctttttaaaaaaagaagagtaatcaatattatgcaaacttaaaatttgtaataaatcatttgctctaatactacaaatatcgcgttccactttagagtaaaatgatttagtgagtatgttgccagccattttactttgacttagatttaattgttttctttctaacttcaatgcctcgccaattttcattttctttcctccaatgtcggataatgactaaatcatcatttgctttctgatataaataaatttatgcaattgaaattttatgtcctgaaaagtatagggtaaattattcaagaataagatactaaatatttagtatcttattttgcatacaattaggctgaaaaaacacaaaatactaatgttataattgattttagaacttaacaagaaattagggaacttttatgaaccaattatatcaagaaattaatgatgctttatatcatgtatattacgggattcagcggattgaagaagaagaactaaagaaaagtcgtttcaatgatcttactcctaaggaattgcatgcagtagatgctattactatgtatgaacatcctactacttcgcaagtagcagaaaaattgcatttgtcacgagctacaatgactgtgactgtcgatcggctagttagaaaaggctatgttgaacgaatccgaggtaagcaagatcgtcgtattgttcatttaaaattgacaatgcgaggcagagtagtgtgccgagcatatcatgcttatcataatcgaatggttaaaagttttttgcaaaatctagatgagaatgaattgcaaacaatttatcatgcatttaaaaatctggatgagtttttgaactcacactaatattattttgaaattgcttaagcagactggagatattcagtctgtttttttgtggacgaaaaaaatttaattacatagaagtgttcttagtattagtgtaaatagaatttttgagttctatatgaacttgtaatgtgttgacaataaaaaaagagatgataagatttgaatatcgaatagttagatatactaattttaaaaaacgaacatggagatgaagttatgccaatgaatactgctgagattcaaagcaagttagattgtcaagctcccttgatgctgttagatcgagttacaactttgaataaagatcaacaagtaattgctcaaaagagtgtgagtgctaatgaatcttattttcaagggcactttcctgagaatccaataatgccaggtgtgctgctaattgaagccatggtggaggcaacacaatttatgtgggatcggtcagatttgattcttactagagttaaaagaggccgctttcgtgagatggtcaagccagggatgcagttgacaattaaggttaacgccattaaaaaatacgcatgtcaggcaaaggttttaattgatgataaagatgtttgtgtagcagacttggaatttaaggtaacagaagaaaattgaaagatgtaaaaattatagcaactggttttgctgtgcctgagcatgtcgttactaatgatgatctcagtaagatcttggatacttcagatgaatggattgttaaacgaacaggcattaaaaggcggcatattagtcaaaatgaaaatacttcggacttggcaactcgtgtagcaaaaacattattgagtcagagtaatgtaagaactcaagatattgatctgatagttgttgcgactatgacacctgataatatgacaccagctacggcagcgattgtccaaggcagaatcgctgccgaaaaggcggtatgttttgacatttcagcggcttgttcaggcttttcttatgctattagccttgctagaagcatgatgcttaccaataattggcgtcacgcaattgtaattggcgcggaggttttatctaaattgctagattggactgatcgctcaacggcagttttgtttggtgatggagctggtggcgttttattaagtcaaagtaatgccactcatttattgggacaaagtttaaaaacttatggtaataaaggtgatcaattaattgcaggtcatttagatgtttcttatgacattttgaaaaataaaaaaagctatcagcctttaccatgaatggacaagagatatatcgttttgctacgcatgaagtaccacggtcaattttgaaagcttgttcaaatgcacaaattgaacttgatcaaataaattattttcttttgcatcaagctaatagtcgaatcattactcaagttgctaaaaagttaaatcagcctttaagcaaatttggtgtaaatattgacgagtatggaaatacagcggctgctagtgaagcaattctgctggctgaaataattcagaaaaacagaattaagccaggcgaaatcattgctttaagtggctttggtggtggcttaacaacggctacattgattattaagtattaatacgaggagaataaaaaatgactaaaaaagaaattttaaaagatgtacaagaaattgcccaagatgaattagatgttgaaccggaaaaaatcacaatgactaccaacatcaaagaggatttagacgccgatagtctagacctttttgaaattttgaatgagttagaagataaatacgatcttgatttagatgctgatgagagcatccaaacaattggccaattagttgattttgtacaagcagaaatggataagcaaaaataatgagttacggtattctgtttagcggccaaggcgcgcaaaaagcgggaatgggacttgattttttagacgatgatctatttaaagaaacgattgaaaaagcaagtttagctagtcaggaagatttggttgccattcttagagatgaaaatggagaactagataaaacaattaatgttcaacctgctctagtagcctttgaaataggaatttttcgtatgcttaaaagagactgtccccatctaaatattagtagaatggttggtctgtctttaggcgaatatagcgcaatgtatgccagtggtagtctagatttagaaaataccctgagcttagtcagtgatcgggctcgttatatgcaagaagatgctgatcagattgaaaacggaatggcggctattttaaaacctaaactcaatgatattgaagttttaattcaaggcctgcaaaagcaaaacaaacgagtttatattgctaactacaattcgcctaaacaagtagttattgcaggtgaaaaatgtagcgttgcattagcttctaagcaaattaaagatcaagatttggctaagcgaattattatgctaaaagttaacggcgcctttcatacaccactatttaataatgcaaaaactaaaatgacgaagcgattagcaaatataaagtttcaagaaagtaaaactccggttatatctaatacaactgctctgccttttagtggaaattggcgtgagattatggctaagcaattaacagtccctacgcattttggctcatgtattcaatatttagttgaacatgagcaaattgatcaaactttagagattggtccaggcaaggtgttatcttcatttgctagacaagtagatcgtcacttaaagtgtagccatattggcaattatgcagaatatcagacttttgtagaggaagaacatggaattaaaggataaagttgtttttattacaggctcaactcaagggatcggcgcagcaatggcagttgcatttgccaggcaaggcgccaagcttattgtgaatgggcgaaaacaagagttgcctaaagatttaaaggatgcattggataaagagaatgctgattatcggtatttatcagcagatttagcacaggacaatttagaggagataggcaaaacagcctggaatttatttggtaagatagatgtcttgataaataatgcaggtcaagcaaaagataaaatgttcattggtatgcatgatgctgatttcgaagaggtattaaatttagatttgaaagtaccttttttcttgagtaaagcaattatgaaaaggatgaataaagagcgttccggggtcatcatcaatttatctagtgtagttggcttacatggcaatgtgggtcaagcaaattatgcagctgctaaggctggtctaattggttttacaaaatcaattgcacgtgagggagcgttaagaaatattcgagttaatgcgattgcaccaggaatgatagatactgaaatgacacaaaaattgtctgaacgtgttaagaaaaatattttggaacagatacctttaaaacgtttaggttcaactaatgaagttgctcaaggagcggttttcttagtgcaaaatgattatgtgacaggacagacaattgtaattgatggtggaatgaccatttaaagaggcaatatgcaaagagtagtaattacaggaatgggggccattgcccctaatggtaatggtgttgaaaattttgttcagaatactttagcaggcaaagttggcataaaaccaattacgaagtttgatgcatctgaaacaggaattagtgtagccggcgaaattgatgattatgacgaaaatgattatgttggcaaaagagaagcaagaagactagatttgtattctcaatatgctattcaagttgctaatgaagcgatggaaatggcagggattgatgaaaaaaatactgccccggaagatttaggcgtgatttttggatccggaattggtggattgactactattcaagagcaagtaattcgcatgcatgataagggacctaaaagagtatcaccactatttattccgatggtaattgctaatatggcagctggaaatatctctatccgttttaatgctaagaatatttcaacttcaattgtgactgcttgtgcttcaggaactaattcaattggtgaagcttatcgtcgaattaaagaaggtgatgcacaggtaataattactggtggatcagaggctactattaatgaaacagcaattgctggtttcgcagccttaacagctttatctactagtacggatcctgatcgagcatcactaccatttgatcaaaaccggaatggttttgtgatgggggaaggagctggagcactagttattgaaagtttagaacatgctcaaaatcacggtgccaaaattttaggcgaaattgttggctatggcacgactagtgatgcctatcatattacttctcctgatcctaaaggagttgaagcagctcgttcaatgaatcaagcaattgtacaggcaaatattgatcctagtcaagttggatatgttaatgcacatggtacagctacacatgctaatgatgctggagaaagcaaagcgattaaccaagtttttggaaaagatagttcagttttagttagttcaactaaaggaatgacaggtcatttattaggagctgcaggtgccattgaagctgtaattactgttgccagcttagaaaaaggaatcttaccaccaaatgttggttgttttaagcaagatccagaatgtgaagttaatctagttaataaagataatcaacagcaagatattgagtacgcaatttctaattcttttgggttcggtggacataatgccgttttagcttttaagaaatggagcgagaattaatggacttagaaaaaatacaagctttaatgaatcaatttgaagattcagatttacgtgaattgaaaattgatgatggtgatttccatttctatttaagtaaaaacaagaataaagttactcagacagtacagccgactgttcaaaagaccgctaaaaaagtggaagaaacagctcaacctgttgttcaagagaatattgacaccaaggttaaaccggttaaagcacctatcgttggagttgtttatttgcaggctaaacctggacaaccagcctttattaatgtgggcgatcatgttaagaaaggcgacacaatttgcgtgattgaggcgatgaaaatgatgacggaagttaaaagcactttaaccgggactgttagtgagataaaagttgaaaatgaagacctggtcgaagtagggcaacctttaattactgttaaggaagattaatttatgagtaaagaactagggattgacgaaattaaacaaattattcctcatcgttttcctatgctgttaatagatcgcgtcttgtttctaaaagttggtcaggaagctaaagcagttcataatgttagttttggtgaaagctttgttcaagcaagttcctctaaagatccagtttttccttctattttaattgttgaagccatggctcaaacaggtgcagttgcattattgagcaaggcagattttgccggcaaaaccgcgtattttggtggaattaaggaagcaaatttcattgttcaagcaaggccaggggatcagatagttttgacaacaaagttaactaaaatcagaaaaaatattggcattggcataggtgaagcgtgggtaggcaataagaaaattgcacaagcagaactaacgtttatgattggttaggtaaaatgaatgtttaaaaaagttttaatagcaaatcgtggtgaaattgctgtccgtattattcgttctttgaaggaaatggggattaaaacggttgccatttattcaactgcagatcgagaaagcttacatgttcaattagctgatgaagctgtttgcgttggtggcccgcaacctactgagtcatatttaaatattaaaaatattttagcagcagccgtaggcatcggggcacaagctattcatccgggatatggttttttatctgaaaatgcagaatttgctcaaatgtgtgaagattgtggcttaacttttatcggccccaaggcggaaacgattgatcaaatgggcaataaggaacatgcgcgtcaattgatgatggcacacaatgttcctgtaactccaggatctaatggagttattaaaaatgctgaagaagctaaaaaaattgctgctcaaattggttatccagttttgattaaagcaacagctggcggtggaggcaaaggaattagacaagtaactgatccaagtcaaatggccgaagctttagcggctgctcaaagtgaagctaaaaatgattttggagatgatcgaatgtatctcgaaaaggtaatgcaaaatgtaaagcatattgaggtgcagatttttcgtgatatgtacggtcatacggtttatttccctgagcgtgactgctctttacaacgaaataagcaaaaagttttagaggaaagtccttgcgatttaattacggaaaatgaacgtaaagaattgggtgaggttgcggttaaagctgcccgagccgcaaattatgttaataccggtacaattgaatttttgatggatcaagatcatcatttttattttatggaaatgaatacgcgtattcaggtagagcatactgtaactgaaatggtaaccggtgttgatttagttaaagcacaaattcaggttgcgaatggaggaccactgccttttacgcaaaaagatttacgggctaaaggtcatgcaattgaatgtcgaattaatgcagaggatccagcaaataattttatgccatcaattggtaaagtttcgtacttatatttaccagttggcaatccggggatgcgcattgataccgccttatatcagggacaacaaatttctccttactatgattctatgttagctaaggtagttgctttgggcaatacacggaaagaagcgattgctaagatgaaacgcttacttgaagaaatagttctgcaaggtattactaccaatcaagaatttcatttaaatatactaaatgatccaacttttattaaaggtgactttaacaatacttaccttgaacaaggctttatgccgcaatggaggagtgaaataaatgaaactatttccgcataaaaatactcctactgatacacatattaaagcaaataaagcggctgatgatcgagtacctgatggactgctgcgcaagtgccccaaatgccatcatgaaatatttgcgaacgaattaaataaattctatgaatgtccatattgtttttacggctttagaatctctgccaaaaaaagattatcgtggttagttgatcaagtacaggaatgggataaggatattgagtcctcgaatcctttaaaattccccgattatcaaaagaagatcaaacatgctcaaaaaattagcggcttaaaagaatcagtttggacaggcttagctaagattaaccaaacgcaattcgccttggctattatggatccaacttttattatgggatcgcttggtcaaatgactggtgaaaaattaacgcgtttgtttgaaaaagcaacgcttcagcatttaccagtcgtactgtttgcggcttctggcggagcaagaatgcaagaagggattcttgctttaatgcaaatgggcaaggtatctaatgcagtagctaggcatagtcaagcaggtcttttttatttagtagttttaacagatcctactactggtggggtgacggccagttttgctagtcaaggagatattattatagctgaaccacatgctatagtgggttttgctggtaaaagagtaatcgaacagactattcatgaaaaagtagcggcagatttacaagatgcagagaacgttttgaatcatggttttattgaccatattgttagacgctcacaggaaaaaagaatcattgaatggttaatcaaggtaggtggctatcatgactaaaaatgcaattgatatagttaaagctgcaagagatgaaagtcatatctctggtcatgagatacgcaaacttctttttcccgatttttttgaattgcatggtgatcggtgtggtactgatgatcctgctatagtaggtgggctagctacttttaatcaagagccagtaacagtaattacaactagcagaggacatttacttaaagaaagaattcaaaaacactttgggcagcctgaaccaggtggttatcgtaaagttctgcgtttaatccaagatgcaggtaagtttaggcgacctgtttttttgtttgttgatacagctggcgcttatcctggtaaaagtgcggaagaaaacggccaaggacaggcaattgcacaaaatttgcttaaagttagtcaaatacctactcctattattacggtcatgtatggagaaggcggctctggtggtgctttagcgcttgcctgcggagatgaagtttggatgttggaaaatagtatttattctgttttatcgccagagggctttgcttctattttgtggaaagatgtaaaaagagcaagtgaagcggcggaagtcatgaaattgacgcccgatgatttactcaagatgaatgtgatcgaaggtatcatcgccgaaccggataatcatcaagaggtttgtcaaaatatagcagaaaagctgcaaagtgagataaacaaattaagtaaattatccgaggcagaattgcttgctaagcgatacgaaaggtttagaaagttttagaggtaaaaaatgagtggatttttagcaggaaagaaaatcttggtaatgggtgttgccaataatcggtctattgcatggggatgcgctcaagcaatggaaaaacagggagcaaaaatcatttatacttaccaaaatgagcgattaaagaaatttattagcaaattagttactgatgaagattgcctgattgaatgcgatgtggcaagtgatgagagtattggacaggcttttggtttgattcaatctcgttttggcaaaattgatggcattgttcacgcgattgcatttgctgagaaagaagaattaggtggctcaattttaaattccacaagagagggattcagccaagcagttgatatttcagcttattctttcttggctgctgcaaaagctggaatcaaaatcttaaataatcctgcaagccttgttactttaacctatatgggatcagaacgtgccttgcctaattacaatactatggggattgctaaggccgctttggaatcggaaatgcggtacttagcgcgagacctgggtgaaaaaggtgttcgggtaaatgctatttcagcaggagctatgcgcactctggctgtctcaggaatccagggtcatgcatcattattgaagatttctaagagtaagactgttgatggtgttaatgtgacacaagaagaggtaggtaatacctgtgcttttttgatgagcgatttggctagtgggattactggagatgtaatttttgtagacaaaggtgtacatttacgctaatgcaaatttacaaatatcgaaaggttacttcaacacaagatcttgcaaaaaaatatttagcaaataaagctcaagaaattgctgcatttatagcacaggaacagacggcaggttatggcaagaggggacgctccttttattcaccagctaaaacaggtatttatttaagtattgcgcttcctaattttaagtttaaattagagcatgcaggcttattaacaatagctattggggtagcggtagttcatatactacaagaacaatttccttcgtatgaatttcgtttaaaatgggttaatgacatttatttaaatgataaaaaagtagctggtattctaaccgaaaaaataggattaggtttggtaataggaataggggtgaatatttttacggcatctttcccaaaaaatatctcaaatcatgtcggcagtattgtacaagctgattatgcttttgagaatatgaatgagcagttaattcgagctgttgtgcaggctgctaatacatatcaaaataataaatttttagacgagtatcgcaaaatttcttatctgaaaagtaaagttataactttgaaaataaatcattattatgtaacaggtcgagtagtgacaattgatgatcaaggacggttagttattagttgtcgaaattctacacgttgctattcaagtggtgaagttattaaggtggaattagaacccggatttaagggtaaacagtaaaatagtacaaaaaaagacttgagaagtaatttttctcaagtcttttagtttgtcttaatttaggttaattaaaacttgttcttgtccaaagcaactggagaatctggcttttcaccattgatcatcttcaagttgttgtcaaatgccttaacaaccatgttacgtacagcgtgggtggtgtagaaggcggtgtgtggagtcaccaaaacgtttggacgatcaattaagtcagctaaacgcttgtctgggaattctttaccttcccaatcttcgttaaatacaccaacttcgtcttcgtaagtatccataacaaagccaaagatcttacctgagtccaaaccgcggataacagcgtcagtgtcaacaagtggaccacgtgagcagtttacaattacaacgccatctttcatcttggcaattgattcgtaattgatcatgtgtacatttgctggaacatctggtacgtgaagtgaaattacatcagcttgcttgtacaagtcgtcaagtgagtcaacgtagtaacccttcttttcgagttctgggttcttgaagatatcgtaagcaatgacctttgcgccgaaaccttccataattctcataaatacttgaccaatgtgaccagtacctacaacaccaacaacttggtcacgaacttcacgaccaatagtaggtgcccaacgtaagtcgcgcttagccatcttttcgtccatacgcttgtcttgacgtaatacacgagcagcttggattgcagcatgttcagcaatagcgtcaggagagtatacaggaacgttagtaatttcaaagccaagttccttagccttgtccatgtcgatgttgtcgacaccaacgttacgtaatgacatcttagttacgccagcgtctgccaatgcttgaagagtttctggggtgtagtctaattgttggtaaacaacaacaccgtcagcacccttagctaacttagcagtttcaggagtcaaaagcttatcagtgtaatctacatcgatatccttgtgagcatccttccattcgtttaagaatggttcttcgtctttacgaatagcgtaagcaaaaatctttgtcataaatttaacctccgtaaaatttattagtatgaccagtcctcattatacgcttttacttgctcaacaaaacacaaaagaaccatttttttgtatagattttaagaaaaataaaagtcaagttttactctgagcaaaaaagttgcaattttttcaaaaaaagtttatagcctaaaaattgcaactattattaactgttacctaatctcaatcccatagatatgaaaattatttttgtatatagcaatattagttaaaggtagtatatggatttgtataagagacgcattttcgttatataacccaggttatataatggactttaagtagagaaacaaacatagcggaggaaaattgaatatgcattttaaaggagaaagccaacagcatttcagcctaagaaagctgacaattggtgttgcttctgtaataatcgggaccacctttatgttttttggtggtcatgctgttcatgcagatgatttaagtagagatgctgagcaaaccagctcagttgttcaaaaacagagtagtgagaaaatagatgtagatgcagtcaaagaagctgataatgtttcaaatcaaagacaagacttacccagacggtactaagagtaccgcaactgttcctgtaactgtcattgcaccaaatgtaccagacgttatctacgtaccaaagggtgacaagtttccagacccaagtactgtagttactaactctaacgatatcaaggacaagattcctgacacgacttacacttggaaaactactccagatactccaaatactaaagtagtaattaactataaggctaataatcctggtactccagataccccagttactccaccagtggatccaggcgataatccagcaaccccagttaccccgcctgtaaagccagagcagaagccaacaacaccaactcctcatgctactaagacaccagcaaaggataatggtggcaagaagacagtagctagtgagcaaaaatctactttgccacaaacggggaagaaggataacgttgctttgactgctatcggtgtagctattgcagctgctggaagcttattaggattagcagatagcaagaagcatagatcttaatttgtaatatctaatttctgtttactaagaagcaagttgactcagataggagctagcttgcttttttgtctaaaagtttaaggatttctaaagacaaaaagcaaatagtgacgcattgtcataaagctgatattatatactcataacaaaaatacaacgcatcaaatagagatgaattgtaagaaggtaacaaatcttctaattccttattaatacatcctattgggcctttattaattcatacattgggtattgctttttgctggttgtcccctatgcaaccgcgaaagttaagattgataataagtccatcccctttttgcgaaggtaaagagtcaagaccccctgcaacatctcttgcgttgaatcttttgttaatcttgataatttatcttcgcaacattagtgatgagtaggctaatgtaaaaaaatctcgttattctcattcaacacaactcccttaaaagggctggtttagaaaagtcatctaaatcagtcctttttctttttttcgttataattaaacttgagaactaaaacaaaggggaagaaaaatgatcttaatttcatggaatatcgattcattaaatgcagctctgactggtacttcagctagggcggaagaaacgcggcaagttttaactaaaattcatgatgccaatccagatattattgcgattcaagaaactaagctgcgtgcaactgggccaactaaaaaacataaagaagtgttggctgaaaagttccctgagtatgactatgtttggcgctcttcagaagaaccagctagaaaaggctatgctggtacaatgtatctttataagaaaggattaactcctgcagtgtctgagccgattattggcgcccctgagccgatggatcatgagggacggataatcacactggaatttgataaatgctttgtcacccaggtttatacgccaaattcaggcagtggtttaaagcgactagctgaacgtcaagtttgggaccaaaagtatattgaatatctgcaaaaattagatgaaaaaaagccagttttagctagtggtgattacaactgtgctcataccgagattgacttgaagcatcccgaaaataatcatcactcagcaggttttactgatgaagaaagagtcgactttaccaatttgctcaatgctggctttaccgatacctttagaaaagttcatggtgagattactggcgtatattcttggtgggctcaacgtgtcagaaccgctaaggctaacaactctggctggagaattgattactggctagtaagcaatcgcattgctgataaggtggtccgctcagagatgatcgatacaggcaaacgagcagaccactgcccaattttgcttgaaataaatctttaaattgaagcaagccctagtataatttctttttgaaatgtttttattttgaaaaagaagtaggggttgaaattctttgaataacgagaaaaaagaagattgggctttggagcaggatctgaagtacaatcgtctgacagcatttaagctattcgcgatgactagttcaatggttatttccgttgatgaactcgcaccatttggtaaaactggagcaacggcactgttttacttgttaattgctggaatcgcttggtttatcccgattacgcaaatggctggagaaatggcctcaattgatggctgggaaaaaggcggaatcttcacttgggtgaaaggatctcttggagacaaaacaggctggacagcaatgttttatcaatggattcatattactgttggtatggatacgatgatgtatgtgatcattggggcattgtctatcacatttgggacaccttggttcaacaccacgccaatcgtacgcttcattttaatgatggttattctgtggggagcaacagcgattcaggtaattggtgttagaaagattggtcgaatcgctgaatggctgtttattctggggattgcgacaccagtaattttattgattatttcattcttcgtatatgtgattcaggggcatcccttgcatatgacgattaactggaatactgtaattccacataaattgaatggtaatacattagttgcctttgtcccatttatgttggccttttgtggtggggaagcttctgcaccgcacgttaaaaacttggaccacatcaagtcatactcaaaagttatgcttggcttagccgttactgcaatctgcttcgacttgctaggtagtatggcaattggaatgactgtgcctaaggatcaaatagagaacagtacaggctttgtttatacctatggcaagctgttaacgtcaatcgggctacctggtgatctgttgcaaaaaattgtgggtataatgttagcctgcggtattattggtgagctaggcaactggattgctggtcctaatcagggaatgtatgaagcggctaaagagggctatatgcctaagttttttgctaaaaccactaagcacggcgtgccattaagaattatggttttacaatcaagtatcgttaccatttctgcattattgattacttttaccagtggtgccgatgcagattttgcgtttaacgtttcattggccgcaacgacggcgcaatatctcatggtttatatgattatgttgattgcttacatggttttgaaaagaaagcatgaagattatcaccgtatgtattacatgagcaagaaccctaatttgagtattgcaattgcggtgcttgcattaatcatcacggttatagctttctttgtaacttttgttccagcacaaggcacgccaagcaatttgcgtcacgtttatgtttggaccttaatcggcatgtgtgccattgtgtcgattttgccacttattttgtatcgctggcatgaaaaatggcaatcacaatagaattaagaagcattcgtttttcaagacggatgcttttttagtagaatttgagagaggtgaataaaatggcggatgcgatgagggatgcaatattaaatggttttgttgatcaaaattatttaggaagtgaagaattaggtcctaaaatattagctaataatcagcaagagagaatctggcagaatttgcgccaggaattgtatagttgcaagtcctttacttgggcggttgcgtttattacgcaagacatgctagttccgtttaaggtgataatggcagatttagcgaaaaatggaattagtggcacgattattactggtgattacttgggttttaacaatccgcgtgtttttacggaattacaaaagattcctaatttagaagttcgtattgctaataaggcaggtttccatactaaaggatatttatttgatcatgaaaactatcaaactgtgattattggcagtgctaattttacacgttcagctctgctggctaactatgagtgggctttgaaagtaagttcaaaaaagcaagcagatttaacagctcaattagtggataaaattgcagatttgaaacaggatagttttgttttaaattcagcctggctaacagattatcgtaaaaattgggtaaagcctgagcgagttgctactgatcggcatcagacaaaaattttaccaaataaaatgcaaaaagcggctttaaaacagatagaagcactagttacaagtggtgaaaaacgagggctagtagtgtcagccacaggaacggggaaaacttatttaggtgcttttgctgttaagaaatatcagccgcggcgttttttatacattgtgcatcgtgagcaaattgctaaaaagtcattagaaagtttttatcgtgtaatcggtggaccaagatcggattatggcttattaacgggaaataggcacaatttacaggccaagtatttatttgcgacggtacaaacgataagtcaacctgagatgctggctaattttaatagcgatgaatttgattatatcttgattgatgaagcacacagggcagctgcaccttcatatcagcgccttttacattattttaagcccaatttttggttaggaatgacggctacgcctgaacgaatggatgagcaaaatgtttaccagatttttgactacaatttggcatatgaaattcgtttgcgggatgcactggaagagaagatgctggcgcatttcattatgtgggtgtccaggattatgaagcagacggagtagtgattgatgaaacaacagatttacgctacctagcttctacatctcgagtagactatgttttaaaggaattagactattacggctattgtggaacaaaggctaaaggcttggttttctgcagtcgacaggatgaagcacgtgaattagctcggctttttagtcaaaaaggacatcccgctgtagcattgaccaatgaggataatgaaaaaagacgtaatgaagtggttgcgtctttagttaaaggtgagattgagtatattgtagcggttgacttgtttaacgaaggaatcgacatccctgccttgaatcaaattgtgatgttacgcaacacacagtcgagcatagtgtttatccagcagttaggccgggggcttcgtaaatatcctggcaaagattttaccgttgtgctagattttatcggcaattataaaaacaattacatgattccgttggcactgaatcaggatacttctcgaagcaaagatcaagctaaacgagaaacgcgtctgccaagctttattgatgtttcaacgattaactttagtaaaattgccagtgaaaaaattttggcttcgcttgatagtgtcaagcttgatgggatgcgtgaattgcggcagagttaccatgatctcaagaacaaactagggcgtgtaccgctactatttgatttttatcaatatggctcagttgcaccgattgtttttgcacaaaatcatggcttggcaagctatgctgactttttgggtaaaatgggcgaagacgttaatttatcaaaatatgaaaatgaagtgctgtcttttgtgactaaggaattacttaatggtaaaagaattcacgagttacttttgttagagatgctacttgaacaagatattgttaagcaagaagattatctagctcaattgaaacgacaccatgcttatgtaaatgatgaattgttagcttctgttgatgcgattttatcgctagatttttttgatattaagcagggaaagactaccaaaaaagcacaatatggtaaattgccgttagttgaacgtagcaatttatttgactatcaattgaatggttctctacgctctgccctagatcaacatgattttaagaatttatttgttgatgctattaaaactggtttggccttaaatcaggaatatgataatcagcgtcaatttactttatatcagcaatatgatcgtaaggacgcttgtcgactcttgaactggcctaaggatgtttcggccccgatgtatggctatcgtgttggtgagcaggacacaccaatcttcatcacttatcataaagatgatcatgaaaagcggaatgctctgtatcgtaatacattggctgatgggcgcagtttgcgctggtatactcgggtaccacggcatttagattctgatgaggtacagcgtttgcttaatacgcgagggatgaatttgcatatatttgttaaaagaagcgatgcagatggtaagcagttcttttatttaggcaaggcaaagattcaagctgattctgttcgcgaagaattgctcggtgttaagaaaaagccagctgtagggatgaacttaatgttgaaacatccactgagtgagtcaatgcatgagttattatttgaatagaccaaaaaagcctttccgcttaggaaaagcttttttaattgccgctaatattaattagatcttggtcatcttggttattatccttatcaaacattctaggcttgatgtgatctagaatcttagtcccgatatttttctgagcagtttcatcaccgctaacctggtttaaaaacataattattccatatcgattatctgtagtcattttgatccaattaccaaaatgagtgttgcttaagctaccataagcagatttagtatggtcatcatctaaatgaagccctccagaataattagtggttgcacttttaagatgagttaagtaatagaaatcggatttgcttaagatactaccattggttaagccaagctggatcttgtaataatccattggggtagtgaacatattgcctgcgcctggaagctgggaggcaagagtctttttaacgtattcagcgtcttggtaatttttaccattattccagacgtaagagataggatcggttttccaactaggaatatcctgataaaggaatgtattagcaagccctaatttgttaatgatgcgattattgaaattgttttcgtaggattgtccgctgattttaataataattccggctaataaaagatagttggtattattgtagaagtaggttcctggtgtcccttgagtgccgttattagtattatcaatagcccaattgatggcgtcattctcacttaaaacttttccgcgatccaattcagtattggttgcttgaatgccagaagtatgggtcattaactgtccaatagtaatattatcggcgtttttaagattagggtaccaacgtgaaattttggtgttttgcgtaaatttttgactagtgtgccagttttcattcatcagctgaattatcattgctgctgtaacaactttttgcaaagaagcagttggataaactacgttgtcgttcccattaccaacttttttaccgtaccaagcgtagccatagctgatttgttgcggctgaccgtttttgataatgacgatactaccgcgagtattgttttgagccaaagtattgcggacaaaatttcgcatttcggttttaaagtatgaactggcttgaacttgtggtggttcagtgatcgcaaatgcaggaactgtcgttagcagcgcagcggtagctagtccaataattgattttttcaaaaattaaaaggcctcccttaaaaagtggtttgtttacattttagcgcgttctttgcatcggacaaactattatcttggtgaaaagacgtatttttagctagcttgttgaaaaagtgcggctaattttgctctgagtgcgggatcatgagcgtataaataggtaccgcggattcctcgcttgaatagaacgttgagtgaattcatgaccatcttctcttcatattctattttttcttttgagttggttagatcattacgctttttgaacatctcaacatctgtaattttgtctaaattaactttaagttgattggtgcggggaatcaggctgattggtggaccgataatgatgccagcataatttaggtcaaaaccttggcaagtatagatagaaccaacttcattgattgttgtaggaatttctgcccaaggagttgatgtgtagttgtattgatcccatggcagcataaatttcccttctttaatgtaatgtttgccaccatcaagagtagatggatagccggaagttgaaagaattcttgccaggccgtctgtttgatttctcttgacgatttcttgccgcattttttctgcatcagtaaaaatacgaaagtcgtagttgtgccacatttctttttttaagggcattaatttattatgtgtaaaaaagttaaaccattctattagactatctggtgccatcattctaaattgatgatgtagttgatagtcttcgtggggataatgatgagtaattgcttcaagtcgcttacgtgtccagaagcttttcattcgtaaaacttggttttcatcaaataccaaaatgataacttttgaccgcttaataacctcctctaattggttatcgtgataaaagttgttgtagtgatcaggctgagataagagcaagtgtgcttcatcaatgacgacaacatcagcactggtttgttttttgtccatctgattaataaatgaagttggccgcatataatttttcttatatagttctttaatcggcccagcaatctgcttatagacttttagcagttcagggtgatttactaaaaagtagttttgagttttatacagttggctgcctgtttggtggtttaatttttgcaactgatcaaaaagggcagaaagcactacacttttaccagtacctgcttcaccataaatagtgaaaacagcaggatgatttttattgctgcaatgtgtaatcgaaaaatgtaaaattttttgtacgagaagtgattgctcttggttgagctgatggtaaggagagagtttaaaacttgcttgattattcaatatttattcacctcgttttcaattataatgaatagaaataataatgataaaggaagaaaacatgactgcacaaaaaataattcacaatcggctatttttaagacaaaaatctgatttagctggcaaaaatgatttacaagttgcgataaacttgcgtgatacgctactagctaatcgtgggaaagctgcggggctggctgcaaatatgattggtcagactaaacaaattattgcgttttatgctggcccgcttccatttgtaatgctgaatccgcgtattattcaaaaaaagcagatgtatcttgctagtgagggatgtctgtcactagaaggcgagcgtaatgttcagcgctatgaagaaattactgttacttatcagaatatggagttagaaacagtaacgcaaacttttggtgactttatagctgaaacgattcagcatgaaattgatcattgcaatggaattctgatttgaatagtagaatatttacgtgattttgcaaaaaaagtaaaaaaatttaaattaattttgcatggtttcagggatgaaaacccacaattttcgaataattagatttgatagaataaaatactttttaatttaatgcaaagataaagaaaaatatattacaacactacctagtgtatcgtgaagaacccgaacgaagagcaagacttgccaaagcggagaaaataaggtaaattaataaagtcgcttcgagagatgcgacgagagcttaaaaacagacatgcaaggaaagaaaacaaataaaaagaaaaaagtacttgcaaagaagtaaataagctggtaatatatttaaatgtcgtcaggtgaaagcagaaaaagcttgagtaagacgaaaaaacaaatcaaaaaagttcttgacaaagaaatgatggtttgataaaatataaaagctgtctgctttgcaaaaaaagcaagacagaggtagtactttgaaaactgaacaaagtttcgctaaaagtgtgcgggtgtaaaaacccaaacaagaagcgaagtcaattcgcgagcaataaatttgagacaaagatcttaaataaggaatgagcaatcattcaaactttttaaaatgagagtttgatcctggctcaggacgaacgctggcggcgtgcctaatacatgcaagtcgagcgagcggaactaacagatttacttcggtaatgacgttaggaaagcgagcggcggatgggtgagtaacacgtggggaacctgccccatagtctgggataccacttggaaacaggtgctaataccggataagaaagcagatcgcatgatcagcttttaaaaggcggcgtaagctgtcgctatgggatggccccgcggtgcattagctagttggtaaggtaaaggcttaccaaggcgatgatgcatagccgagttgagagactgatcggccacattgggactgagacacggcccaaactcctacgggaggcagcagtagggaatcttccacaatggacgcaagtctgatggagcaacgccgcgtgagtgaagaaggttttcggatcgtaaagctctgttgttggtgaagaaggatagaggtagtaactggcctttatttgacggtaatcaaccagaaagtcacggctaactacgtgccagcagccgcggtaatacgtaggtggcaagcgttgtccggatttattgggcgtaaagcgagcgcaggcggaagaataagtctgatgtgaaagccctcggcttaaccgaggaactgcatcggaaactgtttttcttgagtgcagaagaggagagtggaactccatgtgtagcggtggaatgcgtagatatatggaagaacaccagtggcgaaggcggctctctggtctgcaactgacgctgaggctcgaaagcatgggtagcgaacaggattagataccctggtagtccatgccgtaaacgatgagtgctaagtgttgggaggtttccgcctctcagtgctgcagctaacgcattaagcactccgcctggggagtacgaccgcaaggttgaaactcaaaggaattgacgggggcccgcacaagcggtggagcatgtggtttaattcgaagcaacgcgaagaaccttaccaggtcttgacatctagtgccatttgtagagatacaaagttcccttcggggacgctaagacaggtggtgcatggctgtcgtcagctcgtgtcgtgagatgttgggttaagtcccgcaacgagcgcaacccttgttattagttgccagcattaagttgggcactctaatgagactgccggtgacaaaccggaggaaggtggggatgacgtcaagtcatcatgccccttatgacctgggctacacacgtgctacaatgggcagtacaacgagaagcgagcctgcgaaggcaagcgaatctctgaaagctgttctcagttcggactgcagtctgcaactcgactgcacgaagctggaatcgctagtaatcgcggatcagcacgccgcggtgaatacgttcccgggccttgtacacaccgcccgtcacaccatgggagtctgcaatgcccaaagccggtggcctaaccttcgggaaggagccgtctaaggcagggcagatgactggggtgaagtcgtaacaaggtagccgtaggagaacctgcggctggatcacctcctttctaaggaagcgaaggatatggagagcaggaatgctaagagaagtatccagagcaagcggaagcacactgagaaactttgtttagttttgagggtagtacctcaaaaagagctagtacattgaaaactgaatataatccaagcaaaaaaccgagacaatcaaagagaacagattgtagagcgaccgagaagagaattcttgagtaaggtcaagtagaaaagggcgcacggtgaatgcctaggcactaacagccgaagaaggacgtgacgaactacgaaaagcttcggggagcggtaagtacgcagtgatccggagatatccgaatgggggaacccaatgcagagatgcattattgattagtgaatagatagctaatcaaaggaagacgcagtgaactgaaacatctaagtagctgcaggaagagaaagaaagatcgattttcttagtagcggcgagcgaagaggaaagagcccaaaccaagtgatttatcatttggggttgtaggactgcgacgtggcagtgtaagagatagttgaattatctgggaaggtaagccagagagggtgagagccccgtaagcgaaatctcaagcacgcctagcagaatcctgagtaggccgggacacgaggaatcccggttgaaaccgcgaggaccatctcgcaaggctaaatactagttagtgaccgatagtgaaccagtaccgtgagggaaaggtgaaaagaaccccggaaggggagtgaaaaagaacctgaaaccgtgtgtctacaagtagtcaaagcacattaaagtgcaatggcgtgccttttgtagaatgaaccggcgagttacgttatctagcgaggttaagtcagaaaagacggagccggagcgaaagcgagtcttaatagggcgaaaagttaggtgacgtagacccgaaaccaagtgacctacccatgaccaggctgaaggtgtggtaaaacgcactggagggccgaacccacgtaagttaaaaattgcggggatgagttgtgggtagcggtgaaattccaaacgaacttggagatagctggttctctccgaaatagctttagggctagcctcgtggagaggataatggaggtagagctctgtttggactaggggcccgtcaggggttactgaatccagataaactacgaattccagatatccatacacgggagtcagactgcgagtgataagatccgtagtcgaaagggaaacagcccagatcaccagttaaggtccccaaatctatgctaagtggaaaaggatgtggagttgcgtagacaactaggacgttggctcagaagcagccatcattcaaagagtgcgtaatagctcactagtcgagtggcgctgcgccgaaaatttaccggggctaagcatagtaccgaaactgtggatgtgttttaaagagcacgtggtaggagagcgttctaagagcggagaagttgaatcgagaggatcaatggagcgcttagaagtgagaatgccggtatgagtagcgaaagataggtgagaatcctatccgccgaaagactaaggtttcctggggcaggctcgtccgcccagggtaagtcgggacctaaggcaaggccgagaggcgtagtcgatggataacaggtagagattcctgtactgtgtcaaatcgttaagagcgaaggagggacgcaggaggtgaagcacgcatcgcgatggaacgatgttcaagcaacaagtgcggttaagagtcaaatgcttctaaccagcaacacgagttgtgaagaggagtgaattaaaagtagcgaaggtgtggtaatcacactgccaagaaaagcttctagccagagatgacatacccgtaccgcaaaccgacacaggtagtcgagtggagaacactaaggtgagcgagagaactctcgttaaggaactcggcaaaatgaccccgtaacttcggaagaaggggtgctagccaagagattggttagccgcagtgaataggcccaaacaactgtttatcaaaaacacaggtctctgcaaaatcgtaagatgacgtatagaggctgacacctgcccggtgctggaaggttaagaggagagcttagcgtaagcgaaggtttgaattgaagccccagtaaacggcggccgtaactataacggtcctaaggtagcgaaattccttgtcgggtaagttccgacctgcacgaaaggtgtaatgatttgggcactgtctcaacgagagactcggtgaaattataatacccgtgaagatgcgggttacccgcgacaggacggaaagaccccatggagcttcactgtagcttgatattgagtatcttttaaacatgtacaggataggtaggagccagagaagataggacgctagtcttattggaggcaatgttgggatactacccttgtttgaaggatgctctaacctcgacctgtaagccaggccagggacagtgtcaggtgggcagtttgactggggcggtcgcctcctaaagtgtaacggaggcgctcaaaggttccctcagaatggttggaaatcattcgcagagtgtaaaggtataagggagcttgactgcgagagagacaactcgagcaggtaggaaactaggacttagtgatctggtggtaccgtatggaagggccatcactcaacggataaaagctaccctggggataacaggcttatctcccccaagagttcacatcgacggggaggtttggcacctcgatgtcggctcgtcgcatcctggggctgaagtcggtcccaagggttgggctgttcgcccattaaagcggcacgcgagctgggttcagaacgtcgtgagacagttcggtccctatccgtcgtgggcgtaggaaatttgagaggagctgtccttagtacgagaggaccgggatggacgcaccgctggtgtaccagttgttccgccaggagcatcgctgggtagctatgtgcggaagggataagcgctgaaagcatctaagtgcgaagcccccctcaagatgagatttcctttgcgtaagcagtaagacacctcagagacgatgaggtagataggctgggagtggaagtcctgtgaaggatggagcggaccagtactaatcagtcgaggacttgaccaaagcgaagcaaactggaaggttttttgcgagaaggattatgtttagttttgagtgtaaaagctcaaaagagtacggtggcgaaagcaagaaggatacacctgttcccatgccgaacacagaagttaagcttcttaacgccgaaagtagttggtgggcaactgcctgcgaggaaaggaagctgccgtgctcttttttaatattccggcttagctcagttggtagagcgcttgactgttaatcaagatgtcgtcagttcgagtctgacagccggagtaaaggggagaaggaagcggaagacttcttttttgtgccttttgggtatgttaaaaggctaattaggctaagcaagcatgacttgagggtcaaatttaatataatcattaatagaagacatagtaaaattcctaacaagcttaattgaattgattacggaggctatgctctctttttaagtgcataaaaatcttatagatagatacgcgtggtgctagttaaatcgttctagacaataagccaaattataagctaaaattgcaatttccaaccggctttgaaagcctatcagactacgtgctcgattgttctcggcattgtaataggtcagaagcgaaaagtcgctttcaattgttctgcgaatagccatcaattgatgatcattgtgctttttagctcctgtcatatttttacgatatggtgtccaaagttcgtaacccatttgttttagctgttgatgcagttctttgcctaaatagccttcgtcgccaagaagatagtaattagatggatgggtattttctatcagttcaactgtctccctggcatcatgaactgatgcctttgttacgacataatcaagaatgtaaccgtcatcgctaacaatggcatgaactttgaaaccatagaagtaaattttcttggtggccttataaccaatgttggcataaccgcgaaaaattttagcacgatagtttcgaattggttggcaaacaggtaccggaaagctgtcaatgatcaagaactgtccattcaggtcaacctttttattcatttcttgccgtatctgataaatcaattgcaatagctgacgtgaacgccgattaaaacgtgagtgtgataaacaattgaaacattcacagaatcttctttgtgattcaattcctgtcttagcttgccagataagtaaagccaaaatcagactgtccgtagttttaatttgatcaatatttcgccgatgagtaaactcagccggtgcatacaaacgataccagtgccgacaaattatcactaaatctttaaaactaacttgtaaatggtggctaaaacgcttaagcttaaggcagttcaatcagatcagactcttttctattattactatttacaagtcgagtctaacaagattggacttttttattaactaaaacgatttaactagcaccacgcgtagatagattattataaatacgcgtggtgctagttaaatcgttctaggcaatatgccatattataagctaaaatggctatttctagccgctgctgaaaaccagctaagcaaagaaaagtcgctctcaattgttcttctaattgccatcagttgatgatcgttatgctttttagcgcctttcatgtttcttcgatatggtgtccaaaggacatagcccataccttttaactcggcagttaagtcttttcctaagtagccttcatcgcctaaaagataatggttaattggatgagcattaatcatcaattctgtcgtttctttggcatcatgcactgatgctttagttcaagtacatagccatcatcgcttactagcgcgtgaaccttgaagccgtaataatagatttttttagtggctttctagccgatatcagctatgccacgaaagatcttgacgcgatagttgcggataggctgacaaactgggaaactgtcaataattaagaattctccagctgtttttacttcttgattccaatcttgacggatacagcgcattaaaggcaaaagcattcgtgcccgacgattaaagcgagaatgagacaaaccgacaaagaatttacaaaatcttctttgagattcgataccaatttcagtttgccaaataagcatcgctaagatggagctgtcagaaattttaacctgatcaacatttttacggtgcttcaattcatcaggagcacaaagcttgtacaaagaacgacaaattacatttaaccgagcaaagctaacttgtaaatggtgagaaaaacgattaagcttgagatagttcaattagatcggactcttttctatttaatttaagttacaacttgagtctaatccgattggacttttttattaactagcaccacgcgtttataaatattcaacgacagtaaaattaggtaagcaatctatatctaggaatctgttggggttctgattgtagtaggctaattatacaaaaatgagttaacaaaattctgatcagaattagtacggttaagattgaaaaaatagctggtaattattactgtatctctttgtaattaggtagcaatgctattttttacttctaaaatataattaaaccggtcagacaattcgtattgatctgaatttggataaacagttataacaaaactatgtgtgcaaagcagatgacagggacttttaattgatctcgtatgttggagcgcgctgtgttgactatttgttctaagtgaacagatgataagtatgcctctatctaagtaccaagatctaggaaattcattctgaagtagttaatatgtgtcaatatgtcgcacaaaggtaactatgaattacagcaacataagagaaatttgaaaaatagtttttaaattgtggcttgttattagtgaaaatgataaattaaatattattttggcagaaaatacagcttaataacaaaaaataaaaatattttttgcttacctttaaaaatatagttcgagatttataaagtttttaacgagttaaagtgatatttctataattgaaagcagattctactaatgtaattactataatcagaataaatatttcataaaaatacatagaacccgaacgaagagcaagacttgccaaagcggagaaaataaggtaaattaataaagtcgcttcgagagatgcgacgagagcttaaaaacagacatgcaaggaaagaaaacaaataaaaagaaaaaagtacttgcaaagaagtaaataagctggtaatatatttaaatgtcgtcaggtgaaagcagaaaaagcttgagtaagacgaaaaaacaaatcaaaaaagttcttgacaaagaaatgatggtttgataaaatataaaagctgtctgctttgcaaaaaaagcaagacagaggtagtactttgaaaactgaacaaagtttcgctaaaagtgtgcgggtgtaaaaacccaaacaagaagcgaagtcaattcgcaagcaataaatttgagacaaagatcttaaataaggaatgagcaatcattcaaactttttaaaatgagagtttgatcctggctcaggacgaacgctggcggcgtgcctaatacatgcaagtcgagcgagcggaactaacagatttacctcggtaatgacgttaggaaagcgagcggcggatgggtgagtaacacgtggggaacctgccccatagtctgggataccacttggaaacaggtgctaataccggataagaaagcagatcgcatgatcagcttttaaaaggcggcgtaagctgtcgctatgggatggccccgcggtgcattagctagttggtaaggtaaaggcttaccaaggcgatgatgcatagccgagttgagagactgatcggccacattgggactgagacacggcccaaactcctacgggaggcagcagtagggaatcttccacaatggacgcaagtctgatggagcaacgccgcgtgagtgaagaaggttttcggatcgtaaagctctgttgttggtgaagaaggatagaggtagtaactggcctttatttgacggtaatcaaccagaaagtcacggctaactacgtgccagcagccgcggtaatacgtaggtggcaagcgttgtccggatttattgggcgtaaagcgagcgcaggcggaagaataagtctgatgtgaaagccctcggcttaaccgaggaactgcatcggaaactgtttttcttgagtgcagaagaggagagtggaactccatgtgtagcggtggaatgcgtagatatatggaagaacaccagtggcgaaggcggctctctggtctgcaactgacgctgaggctcgaaagcatgggtagcgaacaggattagataccctggtagtccatgccgtaaacgatgagtgctaagtgttgggaggtttccgcctctcagtgctgcagctaacgcattaagcactccgcctggggagtacgaccgcaaggttgaaactcaaaggaattgacgggggcccgcacaagcggtggagcatgtggtttaattcgaagcaacgcgaagaaccttaccaggtcttgacatctagtgccatttgtagagatacaaagttcccttcggggacgctaagacaggtggtgcatggctgtcgtcagctcgtgtcgtgagatgttgggttaagtcccgcaacgagcgcaacccttgttattagttgccagcattaagttgggcactctaatgagactgccggtgacaaaccggaggaaggtggggatgacgtcaagtcatcatgccccttatgacctgggctacacacgtgctacaatgggcagtacaacgagaagcgagcctgcgaaggcaagcgaatctctgaaagctgttctcagttcggactgcagtctgcaactcgactgcacgaagctggaatcgctagtaatcgcggatcagcacgccgcggtgaatacgttcccgggccttgtacacaccgcccgtcacaccatgggagtctgcaatgcccaaagccggtggcctaaccttcgggaaggagccgtctaaggcagggcagatgactggggtgaagtcgtaacaaggtagccgtaggagaacctgcggctggatcacctcctttctaaggaagcgaaggatatggagagcaggaatgctaagagaagtatccagagcaagcggaagcacactgagaaactttgtttagttttgagggtagtacctcaaagatttgaaaaacgccaagcgttagtcgggcctatagctcagctggtttagagcgcacgcctgataagcgtgaggtcgatggttcaagtccatttaggcccattgacataacgaagaaaaagagttaaagttatgtctggccgaaaataaaatactctgggggcttagctcagttgggagagcacctgctttgcacgcaggaggtcatcggttcgaacccgttagcctccattgatccagaaaaaggatcaaagagctagtacattgaaaactgaatataatccaagcaaaaaaccgagacaatcaaagagaacagattgtagagcgaccgagaagagaattcttgagtaaggtcaagtagaaaagggcgcacggtgaatgcctaggcactaacagccgaagaaggacgtgacgaactacgaaaagcttcggggagcggtaagtacgcagtgatccggagatatccgaatgggggaacccaatgcagagatgcattattgattagtgaatagatagctaatcaaaggaagacgcagtgaactgaaacatctaagtagctgcaggaagagaaagaaagatcgattttcttagtagcggcgagcgaagaggaaagagcccaaaccaagtgatttatcatttggggttgtaggactgcgacgtggcagtgtaagagatagttgaattatctgggaaggtaagccagagagggtgagagccccgtaagcgaaatctcaagcacgcctagcagaatcctgagtaggccgggacacgaggaatcccggttgaaaccgcgaggaccatctcgcaaggctaaatactagttagtgaccgatagtgaaccagtaccgtgagggaaaggtgaaaagaaccccggaaggggagtgaaaaagaacctgaaaccgtgtgtctacaagtagtcaaagcacattaaagtgcaatggcgtgccttttgtagaatgaaccggcgagttacgttatctagcgaggttaagtcagaaaagacggagccggagcgaaagcgagtcttaatagggcgaaaagttaggtgacgtagacccgaaaccaagtgacctacccatgaccaggctgaaggtgtggtaaaacgcactggagggccgaacccacgtaagttaaaaattgcggggatgagttgtgggtagcggtgaaattccaaacgaacttggagatagctggttctctccgaaatagctttagggctagcctcgtggagaggataatggaggtagagctctgtttggactaggggcccgtcaggggttactgaatccagataaactacgaattccagatatccatacacgggagtcagactgcgagtgataagatccgtagtcgaaagggaaacagcccagatcaccagttaaggtccccaaatctatgctaagtggaaaaggatgtggagttgcgtagacaactaggacgttggctcagaagcagccatcattcaaagagtgcgtaatagctcactagtcgagtggcgctgcgccgaaaatttaccggggctaagcatagtaccgaaactgtggatgtgttttaaagagcacgtggtaggagagcgttctaagagcggagaagttgaatcgagaggatcaatggagcgcttagaagtgagaatgccggtatgagtagcgaaagataggtgagaatcctatccgccgaaagactaaggtttcctggggcaggctcgtccgcccagggtaagtcgggacctaaggcaaggccgagaggcgtagtcgatggataacaggtagagattcctgtactgtgtcaaatcgttaagagcgaaggagggacgcaggaggtgaagcacgcatcgcgatggaacgatgttcaagcaacaagtgcggttaagagtcaaatgcttctaaccagcaacacgagttgtgaagaggagtgaattaaaagtagcgaaggtgtggtaatcacactgccaagaaaagcttctagccagagatgacatacccgtaccgcaaaccgacacaggtagtcgagtggagaacactaaggtgagcgagagaactctcgttaaggaactcggcaaaatgaccccgtaacttcggaagaaggggtgctagccaagagattggttagccgcagtgaataggcccaaacaactgtttatcaaaaacacaggtctctgcaaaatcgtaagatgacgtatagaggctgacacctgcccggtgctggaaggttaagaggagagcttagcgtaagcgaaggtttgaattgaagccccagtaaacggcggccgtaactataacggtcctaaggtagcgaaattccttgtcgggtaagttccgacctgcacgaaaggtgtaatgatttgggcactgtctcaacgagagactcggtgaaattataatacccgtgaagatgcgggttacccgcgacaggacggaaagaccccatggagcttcactgtagcttgatattgagtatcttttaaacatgtacaggataggtaggagccagagaagataggacgctagtcttattggaggcaatgttgggatactacccttgtttgaaggatgctctaacctcgacctgtaagccaggccagggacagtgtcaggtgggcagtttgactggggcggtcgcctcctaaagtgtaacggaggcgctcaaaggttccctcagaatggttggaaatcattcgcagagtgtaaaggtataagggagcttgactgcgagagagacaactcgagcaggtaggaaactaggacttagtgatctggtggtaccgtatggaagggccatcactcaacggataaaagctaccctggggataacaggcttatctcccccaagagttcacatcgacggggaggtttggcacctcgatgtcggctcgtcgcatcctggggctgaagtcggtcccaagggttgggctgttcgcccattaaagcggcacgcgagctgggttcagaacgtcgtgagacagttcggtccctatccgtcgtgggcgtaggaaatttgagaggagctgtccttagtacgagaggaccgggatggacgcaccgctggtgtaccagttgttccgccaggagcatcgctgggtagctatgtgcggaagggataagcgctgaaagcatctaagtgcgaagcccccctcaagatgagatttcctttgcgtaagcagtaagacacctcagagacgatgaggtagataggctgggagtggaagtcctgtgaaggatggagcggaccagtactaatcagtcgaggacttgaccaaagcgaagcaaactggaaggttttttgcgagaaggattatgtttagttttgagtgtaaaagctcaaaagagtacggtggcgaaagcaagaaggatacacctgttcccatgccgaacacagaagttaagcttcttaacgccgaaagtagttggtgggcaactgcctgcgaggaaaggaagctgccgtgctcttttttaatattccggcttagctcagttggtagagcgcttgactgttaatcaagatgtcgtcagttcgagtctgacagccggagctagcggaatatgaaagaggcgggggccagaggcttccgcctttttgtgtgctattaaagttctataattaagcttttctaagtcttgaaatttttttaaatagggtttccaaggaactttgaggagtttgtactctgaatggtattgatggatacgttattttttctgccggaaagccacagaatggacaagtgggctgctttaaaagggcttcgtagactttgtattgcactccattgaagaatttatagaaattgttgtaaaaaacgatatttttatctttaatatcgagatcaaatttaatacaatcattaacagaggacatagcacaactcctaaatagcttaattgagacagaatatcataaatattcatcaacaggaaaaattatagagctaataaagaagttatagctttttatttgcgttatgaaatgtataaacttgttgtctttgtctctctattagactggtaaatattcaaaagtatatgttaaatttcagacattaaatacttagaaaaaaggacatatttagatggataaaaattctgatagacttacgttagtgccatatttcccgaatgaaaagcagactcttaaatggtaccaggatcctaaaatctgtaagcaggtagataatattgataccgtttatgatttaactaaattacgtcgaatgtatgaatatttgtcagtgcatgggtggtgctactatattcaatatcaagggaaattgattggtgattgtactttgctaaaagacggtgagatatcaatcgtgatttgcaaagaatatcaaaacttgcatcttggtagaaaatgtgtcgacaaattggtgcagcttgcaagaattcagaaaatgacgcaagtgaaggctcacatatatgactttaatattcaaagcaaaaaaatgtttacaagaatggggtttaaagagcaacaacctgactggtactcttatgatttatagatcaaaaatattcatgttaccaagtaattcatacaaacaatcagttggtgtgatgtcagataagcactcgtattagaaaaatgtaatcatcagtaattaaagactgtagttgaatcaaataattaactcagcgtataaaatgctgagttagacaaaaaaacaacgagcaattctctcgttgttttatggattcattttgatcaaatttttagtttatctttagttgtaaataccaacttgattaatgtgggccaattccagaactggagattgagcgaggtccaaactaacatcacagccagcatggataccattattttcgccattaagccagtgggtattattagttacgtcatagacagtaccattaaatgcaatataagctggacgtccatttttaccattgtaatttgatagagtttctttagtaaattttctcatataagaagctcctttctaataagatcttgatatattaatggtaacactttgtcaccttatagcaagagatacgaaggagtcttatgcttttcttatgaaagatgaccacgccacccagcaatatcccaatctagaaagtcataattaagctttttaccataaattttctcgtaggcagcaactttttgtcggtagtcgagttccatcatcttatgagcgttttcgttggcgtttagagaaacgtcagggaagattggtggtaaaacatggacaatatatttggtctcataaaaattaggatctttcttttcgattttaggtagatccttaatctcgacaaaagtggagactaccggtacattttgtttagccgcaaaataataggcaccacgttgtaatttgcgaggcttgcgataattccaccacatctcctgttctggataaattaaaacccaattatttttagctaaagctgcactgaggtgcttaggaaattcatttccaatatagctaggactctgaactagtggaatagtgccaacataattcattaaatagcggaaaaatcccggtagcattaggttagtatcttcaattacaattgaaagctgatggtgcatcttgttagcgagcagcttcattggtaaagaatcaacctgattgtagtggttagaagttaaaattgcgccaccaataggtaaattatttaggttctctaaacctacaaattcagttgatccagctaatgctctggataaagtaccaaataagagatgtccaatacgattattaagcttacttgaaaaagtgttacgcttattccaataatcattgaccaatttaaggcgctgatctagggacatttggggatcgccgatttctacttttgctgtgaagttacgttcattagcagctttttttatatttttaatcactgcctcacgattatcgccaaaaatcatagtgttactgcctctcgtttcttaacttttgcccaattattaggatcttgctcagttttgtcttccttagcaagcatatgatccaatttttcgcggtctgctgcacgctcgtcatcagtataattattgagttcgttctttaattcatcgaaaaactgcgtttgtttggcactatcccagaagtactgtgcatattggacattagcaaaatgccatggcttaaagaaaagattatagtgaatcagaccaggattagttaaaggttcagtgttttcatttggcatagcatcccagcgaggatttaagtgcaaaattctgccttccccgatttcatttaaatagtcttgatcaggagcaatacaatcaaaatgatacttttctaaaagtgtcataaaatggtcaataaaatgttcagcgcgaaaggccctagcattcatgacgagcatgccagagttaatgtatttcttggggtcaagtgccaggacatttttgatgtattttatcatcttgtctacatattgaattgaggagtcggtgcaagcagcaaataaattatcacccaattcggagttgtatagtttagcaagatcgtcgtttacaattgtgtcgctatcaatatagatcaccttatcatattcgggaaaaagttctggaataaagaggcgataaaaaatcgacatggtaaaaaagtcagcgcgaagaaagttttccttacgattttgaataggttgtacaagttgatcatcaatatggaaaaacttcacatgaacgtttgaactgctaagatcagacaaagctttttgatgctttgatgagagatcttgatttaaaaagtaaacagtataatccttatttggatctgtatgtttgactaaagaattaagagaaacagcagcgtatttggtaaagtcatcgctgatactgtaaaaaataggaattgtcataaaattacctttcttagattttaactgattccgtttgtttaaccttagcccaggtatttggctctttgacaatcatgtcaacttttttggccatccattctaggttagctcgggccttttgacggtcttcatcagtaaagttgtctaattgctgctttagttcatcgtaatacggcgtagttttagcaacataccagaaataatgaccatattgaacatcagcaaaatgccatggtttgaagaaaagattgtagtgcacgatcttaggatcttgaatttcaggaatgctttcatttggcatagcatcccattctttaggtaggtgataaatcttatcttcgcaaatttcattcatgtaggcttgatcagggtcaacgttatcgaaatgatatttattcattaagtaatagaatttatcaacaaactttttgtctctaaaggccttcatattaaacagaattacaccattattgatgtatttttctgcaggaaaaattccctgacattctttaatgtacttttgtaaaagtggcatgtaacgaattgataagtcgggacatgaagcaaacatgttgtcggcgatatcaatttcatacattttagcaatatcagtacagataatagtatctgcatcaagataaactgccttgtcatattgagggaacaattctggaatgaatagtcggtaaaaaattgacatagtaaagaattgagcacgcaagtagttttccttagtattgtgaattggcttaaccatgtcatcgtcaatatgaaagatttgaacatgaatattatcagttgaaagatcttctaagctctttttgtgctcatcagatatctgttggactaaaagggtaatcgtatagtccttcttggggtcagtatggtcaattaatgatttaattgaaacatatgcatatggcgtataattatcgctaattgtgtaaaaaacaggaatggttttcaaaataagatcctcctaaattatttttttaaattatttcgtaatttgagatattcgttaagcaaatcatcatattcatgtaaatgaagtacactgtgtacgcgatcaacatcccatggcttaactgtttgagtatggaaataaggccaaaacctaaagctagtagtgaaatgttgaattttggtgtttttttgcaaatgatattgctcattataacggcgtggtgctactcgcttggctacagctagcttgtttattgctgattggtcgggcaaaaacatttgcttaacctgcatcatatgccgcacctcggcaaagagatcagtttgcttaattttcttcatattcagcaacaaaacgccagaattaagataatcaaatgcgcgcttggtcttaagattgtggaagaagaagcggccccaataatcaagtacgcccactaattcgattccggtaatatcctcattgtaaaaagttgtaatatcaccgcgaatgacaatgtcatcgtctaaataaagaatgcgatcaggaatctgtggcaattggtctgcaaataaacgcaacatagcatatggcgtgaagcgagtattcatgttagcggttggcggttcctgttcaaataacttggtgcagtcaattaattcaactgtactgttaggattggctttttttactaaagaacgtaaaaaatcagccgcatgttgtgagaaagggtgatatttacgttcatcactgtgtgcctccatcgttaaaatataaagatgcaattcttgagcaccagaatttttgattaaagataaggtggaaatcaaaacgccatcttgagcattttcatctccacaaaaaagaatattcatgataaactcctattttttatttcttttgaatatattgacaatattcataatcgctattttttgcacgctgcttcattacctgccaaatttcatcgtgaagcttattttgagcttccttacggcttaaatttgtatccgggtaaaagggcccatcaatgtaaataacggcactaggccgcttgctaagccactttttatggtaggttttggtcatgacgaaactaggcgcatttaatttaactggaaagtgcatgcttgttgcatcgaacgggcgaatcttcgtgtaatagggccagacatgagcttcagggtagatgagaatctcgccctttttatccttaatcacagtttgaatggctttaattagtttgagcgattgcttcatatttttgccaacaggcagaccgccgtagcgtacaagatatttgccaatgaaggggatgccccagttagcttgattagcaatagcataaaaatttttgattggaaaaattgtgagcgaggtaaagacatcccccatgggtctagtatggttgccataaataaaatagcccccattgacttgcttaagtttttcttgaccaacgacttttacatgatcgaagaagcggaaaaccacccaaccaaaagcgcatgctaagtgacaagcggtagtggaccagattctagctccaagagaattaggtagaataacgtaattatcgggtagactgaaattttgatcgtgactatcgactacatcatcggttgttttttggtaataataaatccgtttcatcttgccctccatgatacttatgtatcctatgataccatggaaaaaagcctaattcctaagacgagaggaatgctgaaagaaaataaaaaagattcgtaatttcatgatcgaaaaatacgaatcctctgtaaaatagcataaaaaaagcaccgccttcttgcagtgcatctttcatattatgggtggccaggggatcgaaccctggacccacggattaagagtccgttgctctgccagctgagctagccacccatatttgttcatcagctcccgccgacatttaaatatattaccagtagttttataatttgacaagctttttttgaaaaaagttgaaaaataatttgaagctagcaaaaagcgcccataatggccgcttttttactaaagtttatcttgaatatgataggctgtgccttgctgatcctgcttcatgtgatctgcatagtaaacagcatagacaccgctttgatcatttttggcaatcacaatttggcgccctgttggacgttctgccttaatgatttgagcactgcggcgtgcttctttaaagtcgtgtgaagatgcgatggcatcccctggattaaaaaatacagcttcgttcattgtaaagccccctcgtacaaattctaattttattttaccaataaagccctttctaaatccaatttaagaaacaaaaaagagataagatcaacatcttatctcttacgaaaaatattatgggtggccaggggatcgaaccctggacccacggattaagagtccgttgctctgccagctgagctagccacccatgtcgttgaatcaatcaacagatattattatgctattgttgataagaaaatgcaagctttttttgaaaaaaaacaaaaatttttggctaatgttacaaaattcagtataatgtaagggcaaaggaggcattcccgatgccaaagaagattctcgtcgtcgacgatgaaaagccgatttctgatattatcaaatttaatttaactaaggaaggctttgatgtcgacaccgcctatgatggcgaagaagctgttaaaaaagttgacgaatacgacccggatctaatgattctggatttgatgttgcccaaaaaagatgggttggaagttgcgcgtgaagttcgtcaaacgcatgacatgccaattatcatggtaactgctaaagatactgaaattgataaagtcttaggactggaaatgggtgcagatgactacgtaaccaagccgttttctaaccgggaattagttgcccgtgtgaaggctaacctgcgtcgtcgtgatattgttaaaaaagcagaagctgctagccaagaagagaccgataagaatattaagatcggtaacttggtcattatgccagatgcctatattgtagaaaaaaatggtaagaagattgaacttactcaccgtgaatttgaacttctttactatttagctcaacatatgggacaagttatgactcgtgaacacctgcttcagactgtttggggttatgactacttcggtgatgtgcggactgtagacgtaacggtgcaccgtttaagagaaaagattgaagataatccaatccaacctcaaattttagttacccgtcgtggtgttggctattatgtaaaacagccgagtgaagaataataaagaaagccacagaactgttatggtagtggctttcttttttatattttttagatattgaatgagtagaatgaaaaaattcaaagcaagattaaatagtacatttaattccattaatactaaaattgcaattgtgttcatgctgatgctactggcaacaattgaagttattggagcttattttacccgtcaattagaccaaaatagcattgaaaatttccaatcatcaatccagattcagactatcgtcagcaatcagttagctaatcagttgaccagtgataataaaaatactaatgatcgcttgaatcaaattgttaatgactacaataatgatgcaattagtgaaattattgttgtcgataataaggatacgattcgtgccgtttctaacttaaatgataaaagtaagatcggtcaacggattaacaatactgatgtgaagcaggttatttcaactggacatcaaattaataaagtggtcgatgatcatggcaattacatgattcaaatatcgccgttgactagtggcaatggctctaacaatactgttggtgctgtctatgttaaagctagtatgcaagatgtctttaacaatttgcgccaaatttcattgactttcttgattgcgtcattgatcgcggctttattaggtgcatttttgtcattagttatttcccgggcaattacgcaaccgatcgaagaaatgcagaaacaagcattgcatattgctgatggtgattattcaagtcaggtaaaaatttattccaatgatgaactagggcaattagctaaagcatttaataccctgtccgtacgaattgaacgctcacaagaagagtctgatagtgaacggcggcgactagatagtgttctgtcacacatgagcgatggagttctagccactgatcgtcatggtaacgtcagtgtggttaatcatatggcactaaactttttaaataaaaaagaagacgaggttatcaataagccgattgctgaagtactgggactagaagatacttcgtcacaagatttgatttctagtcaaaaagagatcgttattacccttgatccaggtacgcgggatgaaattattttgcatgctagtttttctttgattaagcgggtaactggctttgtatcagggtcagtttgtgtattacacgatgtaactgagcaacaaaagaatgaagattcacaaagacagtttgtttctaatgtctcacacgaattgagaacacctttaacaagtttgcaggcttatattgaagctcttaatgagggtgcttggaagaatccagagattgctcctaagtttttggaagttacccaacaagaaactagtcggatgattagaatgatcaatgacttgttgagtttgtctagaatggaccgtggcgtttcaaaaatggatctagaatttgttaacttaaacgattttgttaaccatattcttaaccgtttcgatatgattgttaaaacagataaaaataaagaaaagaagaaatacacaattaagcgtgaattaggcagtcaagccttatgggtggaaatcgataccgataagatgatgcaggtaattgataacattatgaacaatgcaattaagtattcacctgatggcggtgtaattactgttagaatgacccaaaaccaaaatcatgttatcttaagtatttctgaccagggcttgggtattccaagaaaagatctgggtaaaatctttgaccgcttttaccgagttgataaggcacgttcccgggcccaaggtggtaccggcttgggcttggccattgctaaagaaattgtggaagctcaccatggtaaaatttgggctgacagtagcgaaggcaaggggtctactttctatatttccttgccatatgaaccgatgacagaggaggatgattgggatgaagtttaaattcaaattcggtgaatttttcttaggcttagctacactgatcgtcattgtcctctcaattgtgctttggatctttattatgactagtgatcagcgctttagtaatattggtcagcaaaatcaaaataatatcactaaagagcaaacgcgtagtcacaattttaagtcattatatgatttatatattccaactacttcatatggttttgctaatggaaatttgtgtcagctatatgattcaaaaaataatttgactttagaatttaccaaagagataaaaaaagccaaggccactaataaaattaagaaaatagttgatactagaactaaatatgaagagtatttaaacaatcccaactatgtgcagttggtttatccagatgaaattactttctccttatttaaccagttgaataatgccgcaaatgataaccgcgagtttaaccgcttctttatctcgcagtcaaatcactggatttatttgggaaatgatcagactaatgaaatttatcaagtaaaaattgctggcgcaaattttgataaactacgtaaatatgcatgtaatgctaagagcaagtatccagttagattagttcgtttaaaggaaggctattcaccgttttacatcaagacaatgaatgctaaagtttatagttacttgactaatcatcaatcgtattcttactttgtttcgcgtttattaggtacatctggcgttactagtaagactaataagaatggtcaaacggtatattctttgaactactatactcgcttaagagtgccagattctaattcaggtgagcataattatctttatactcattatgaaaaaaataagatccccaatactactaaccgcttattagatagcgtttattatgttcaccaattgggtttaaccgagcaagatttacgcttctttgatgcagatggtgctaatgttagttatctaaactatattgaagggattcctgttttcttaaataagcatgatttgcaagtcaagacgaccttttcaacagattcgattaatgtggcctttaatagtgtaaacttccaaattccaattccgtttgatggtcaaactaagcggttaaaaccaacccaagatgttgttgatgaattagtcaatcacggcctaaagcaggaagatattcaacgaattatcgttggttttgctgaagaaaaggattcaagtcaccatagtttgattaacttgatcccaacgtactatatcaaagcctacgatgaatggaagagcctaggtgaatgggaaaagcaagacgtatctacctaccgtgaagctgatcagttaactgttaacgaagggggaaaatagaaatggaccataaacgaatcgaatggctatttttcgttgttttctttttaattgatatttatcttggaatcgaaattctccgttctcccgttaatttaagtaacgctgataccactactcgtagtgttgctagcatccgcaatgaaatgaagtcagacaatattgatttgcccgataagatttcggatgcaccagattctggttattatttagctaccaagaatcgtgactatctctctggcaaagttagctcgctgactaatgtaaatgcccgctattctaaaagcgataatgtgctttatggtgaaccaagacaagcagtccttttgagtaaaaaacctaaggaagctttagaacaaattgaagattttaagaatgattcgaaaaatattccttatggtaaagaattcaagtatgaacctgatatgtcgagtgaagacaattatgtttttgtgcaaaactcagattatggtgaaatttatgctaactcggcccaattgaatatcaatgtaaaagataatcagattattaattttactgaaacatatatggggcaagctagtccagtgcgtgaattacagtcaaccatcagtgcttggcgtgctgtgcgtgcgatgtacactgatcgtgagttgactaataattcgcgcgtaacgcaggtaaaattaggttactccaaactgacagaagtacgtggcagcacaatcttgttgccaacttggctggtttgggtagaaaataagacaactaaaaatatcacgatgaaacgtattaatgcatatacggcacagatgctacaatcgagtacctataatgtagaaaagtagaagggacaaaaattgaaggtttccgttttagcaagcggctcgaccggcaataccagtttaatcgttacaggccagcataaaatcctgatggatgctggcatttctggtaagaaaactaaagatttgctagccgaagttggagttgatattaacgagattgatatggcctttttaagtcatgatcataccgatcatagtggcggactcggcgtgttgatgcgccgttatcctaagatagatgcttttgccaatagtgggacttggcagtatttattggatacgaaaaaaataggtaaattaccggctgaacaaatgaatacaattgaaccaggccaaactaaaacttttggtgatgttgatattactgcctttgcaactagtcatgacgcagctgagccgcaatattatgtgtttactagtggtggtaagcgggtcgcttttttaactgatacaggttatgtatcagaagaagttgaagggacaattgaagatgctgatgcctatatgatggaatttaattatgataatatgatgctcagagatggaccatattcctgggcactgaagcagcgaattttgtcggatgtaggccatttatctaatgacgaagcagcccaggcattagttgatgtagtcacacctaaaacaaagcatatctttttagcgcatcgcagccaacataataatacggagtatttagctcacgaaacggcaaaggaaatgctgcttgagggggatgcgaatttggatgatgatgttaagattattgatacagaacctaatcagcctacaaaattagttgaaatttagcagttttcacaacattttttcatataatattcaaatttaatcggtatgattagtaaacaagatgaggggagaagcaagcatggtagaaaatcaaaataataataacaatttacaacaacctagaaaaaagaatactaatggtaaaatcattgccactgcagcgattgtcggtgtagttggtggcttgatcggtggaggcgtttcatattacgcagctgatcaaatgaataatgcatcagttaataatggtgccgctcaaactagtgtatcttcaagtagtagtaaagtttcagaaaagagtgctaagactagtggcacaatgactactgcatataatgatgtaaaaggagcggttgtttcagttattaacttaaaacgccaatcaagttctaatagtactaattcactttataatagtttattcggtaatgatgacagtgatgatagctattcatcaagcagcaagggcaagcttgagacttacagtgaaggctcaggtgtagtctacatgaaatctaatggcaagggctatatcgttactaacaaccacgttatctcaggcagtgatgctgttcaggtaatgctagctaatggcaagacagtaaatgctaaagttgttggtaaggatagtacaactgacttagctgtgctttcaattgatgctaagtatgtgactaagacggccgaatttggcgattctaagagcttacaagctggtcaaactgtcattgccgttggttcaccattaggtagtgaatatgcttctacggtaacgcaagggattatttcagcaccggctagaaccatttctacttcatcaggcaatcaacaaacggttattcaaactgatgccgcaattaacccaggtaactcaggtggtgccttggttaactcagctggtcaagtgatcgggattaactcaatgaagttagcccaatcaagtgatggtacttctgtcgaaggaatgggctttgcaattccatcaaacgaagtagttacgattgtgaacgaattagttaagaagggtaagattacccgtccacaacttggcgtaagggtaatcgcacttcaaggtattccagaaggctacagaagccgcttgaagataaattctactttgaagagtggtatttacattgcctcagtaaacaagaatagttcagctgctaatgccggaatgaagagcggcgacgttattaccaaggttgacggcaagaagattgatgatgtggcatcgttacacagcattttatacagccataaagtcggtgataccgtaaatgttaccgtgaacagaaatggtaaggatgtcaacttaaaggtaaaacttgagggtaactaaaaatcaaaatagaagttaattaaaagaaaaaaggctatatcacgcggtttaaacgtagatatagcctttttgttaactttttaaatgtgtaacatcaaattgttcggaattatttgttgtcaaacagacactagcctgttgataagtgtggataactctgtggattgtgtataacttgataaatataggtttattaacttgtggaaaaatatgatgattttgaccttatttagtgaattctatttgagaaaacaggcgttcatgcaggcataacaagccttaagagataaagtttgtgaaaaaaggctttcataaaatcgatgtgaataaagaaattttagaaaaattattaaatacaacttctggggtataagtaaaataataccacaaaatgttgaaattggtctttgaagttttgtggaaaagtttgggtaaatagtgtggaagggatgttagtattgtgctggtagattaaaattatgaatggaaaattagctatgcttgttataatagaagcatgaatatcaaaattgtatgtgttggaaaattaaaagagaagtattttagggatgcaattgcggagtatgagaaacgactcagtcgttttgcaaaggtgtccattgtacaggtgcctgatgaaaaagcaccggaaaaattcagtgcagctgaagatgagaaggttaaagagattgaaggtcagcgaatcctgagcaaaattaaagataaggagtacgtgtatgtgactgcaattaaaggaaagcagcgcagcagcgaagagttcgctaaagagattcaggatctcgcaacttatggtcattcagacattacgtttgtcattggtggcagtttagggactagcgatgctgtaaacaagaggggaaatgacttgattagttttggtaaattgacgatgccacaccagttgatgcgcgtggtgttgattgaacaaatctatcgtgcatttatgattaactcaggtagtccttatcataagtagaatatagaaaaagcccataaattgggctttttatttttgcatatttgcagatttcacaagcatattgaaaaaaactgtggcaggtcagtgcttttttagttttttatgatttaaaaatagattttgttaaattatgtttggcaacaaaaaagacgatctttcgatcgccctgataatttttgagctaccagctagtagctcacgcacacgctgaagtgtactttatctttgtagtatctcaattttaacacataaatggtaaaattaaaactgcacgctgaagggggtaagtgtcaatgtttttgcggtagcctttaaaccattagtctaaccttaatttcttaaatatttatatgacttaaatttctgcttagcttgcttaaataactattgccagctacctgtgcggttaatgcgccatgctggatgcctaaatgaacttcatgacgcttctttaagctgtcacgggccgctgcttttaattcctgttcagtcaatacagttatttctgaatcttcaaactcgctgctaagccaaaattccagctctcgattcttgatgcagcttaagatcctaagcatgccttctgctccagattttgaccatttcttgccttgccccttaacacggtaggtatacttgcggtggttgctctcgcagcagccaatggctttagtcacagtcagttttcgtttcttaaacggcttaatatcgtcccaatgacgatcaatataattccttaggcgccccagataatcatgattgagctcggtattcaattcatcaattagtcggctttctgcagtggttaggatagttttaactttgtcatagctgtatttgtattccaaagcagaaatcagcttgccttgcaggtcaggcgcaaaatatagcctttctttgattttcttatttaggtgaaagacatccaagaaatgctcatgacgcttgcatagccctacaatgtcatcgaagtctgttttggcatatccagcaccgccatcggcgttgctaagaattacagtatcagaaagatcataagtattggccaggtactccttggcttcgttcagcgcatcaagtcggcttaaagaaacaaattccttggcattgattcgctttctgcgtttcttgcttatattgacaatgccttcacagacctgatagcgatgaaattccaaccggcttttagtgcctttgatcaccacgccatcgccttcaagatacaaaactgggacctttttcttagtgcctgcggcatcatatcttgaatctgcttcttggcccgctttaatatttttcccggccatttttaccaaattgcccacctgcatatggctaatattaaagccagacaggcaattgactgctagagcagtattgcgataagtggcaacgctgcttacttctaagatgtttttgactgctaaaatactgtagcgcttgtatttgtcaaagcccattaattcatccaagggataccttgcttgtttgcctgggcagacatatcttcttctgacatacctaacttcgccaaaagccatattgattgagcgctcattcttcttatcaatctgatagccctgtgctttaaccttggtaatcatttcatcatcaactttagctaaagccaaggccatgatttccttaatcaggtttaagaagaaacagattattacgcgtggtgctagttaaatcgttctagacaatatgccatattataagctaaaatagctatttctagccgttgttgaaaacctactaagctcctggctcgattattctcagcattgtaatagctaagcaaagaaaagtcgctttcgattgttcttctaattgccattaactgatgatcattatgctttttagcacccctcatgtttttacgatatggtgtccaaagcacgtatcccatacgctttagcttggctgctaagtcttttcctaaatagccttcatctcctaaaagataatggttaattggatgagcattgatcatcaattctaccgtctcttttgcatcatgtaccgacgccttagtaactgcgtagtcaagcagatagccatcatcactcactattgcgtggactttgaagccataatagtagatttttttcgtcgctttataaccaatatcggctatgccacggaagatcttaacgtgataattgcgaacaggctgacaaactggaatcggaaaactgtcgataatcaataattctccacctacctttacttcctgattccaaccctgacggatacaacgaattagaggcaagagcattcgagctcgacggttaaaacgagaatgagataagccaacgaagaatttacagaatcttcgttgagattcaattccaatttcagtttgccaaatgagcatcgctaagatagaactatcaggaagcttggtctgatcaacatttttacgatgtttaagtccatcaggcgcataaagcttatacagcgagcgacaaatcacatttaaccgattaaaactaacttgtaaatggtgagaaaaacgattaagcttgagatagttcaattagatcagactcttttctatttaaattacttacaacttgagtctagtctaattggacttttttattaactaaaacgatttaactagcaccacgcgtagattatttttctttcacgcttaatataattatcttcagactttataatatttgcgatttcagttacaattgaattcataaaagaccagcttctaatgtgttttttgttcttaacatcagactactggtctttttgtttgagctcaagtccaaattcaaaggacttgggcttttttaattatttattcaacttaccgtaaaaaattatacacttagctgaaggggtagcgcccttactcgtgtggaaggaggtagactcaatacagccgtccttcggggcggctttttttatgatgaaaatggcaagtcattgggtgaaaagtattacgcatatcgtgcagtaactgtaaatcaaagtcccataacaattaatggcgctaaattctacaagttggctgatagggatgcttatattaaggtgaccaatattagtggtcaaggtcgcgttttaaagcgtaacgcctacatctacagtacatcaaaaaaaacgcactacgcataacggtgcttggaagttgtacaaaggctccacagtgacaacttacggtggttcatacaagtttaagaatggcaaacgctattacagaattggcggacctgctaagcaatatgtaagaacatcaaactttaattagaagttgaatatcatttacgacagcaacataatagttgctgtttttttgcctcaaaaaccatagaaaatcttctgtaatcaaggtaaaatgaaattgattttacaaatatcatggaggatgttggaatgagaaaacgatggacagcagctgttattgctgctttagttgccgtaagtactgccgcaactactgttaaggctgacgatactaacacaacagctaatactaatgagacgcaagtaactgcaactagtgaccaaactaattctgattcagataaggttacttataacaaggcagattatttgtctgctaaccctaaattagtgcgaattaagcatgcaactactgcttataaggatgctgcattgactaaatcagcacagagcgtaaaagcaggatcacactttttaattagtcgaattgttaaatctgacaaccaagtaccaatactaaagactagtgatggcttgtatttgcctgctaaaaaatctttggtaactaaggtcatagcctaccaaaatcctaagggttatcatcaagtacattacacacaagttaaaccatacggtaaggtgggttataacttgtaccgtggctatgagggtattaagacttggaaagtaatgcatagagttggtacttgggcaggtacgaattactataaccaagctacttataacgcagtaaagaacttccaacgtagtcaccacttgccagcaactggtaatgttaacttagctacttgggaaaagatgggcttttctaagaagtcatggtatagcattgatagttatgttgccccacttaaggcttatgcttggcaagggcgtaaagctcatattgaagcaatgattaatcaagcttacaaatatatgggaaaaccatggttagcaggttgttcaactagtccaagctacggtgttgattgttctggtttggtaatgcaaggtctttatgcaggtggcattagtccagttccaactagttcaatcggccacgctcatccaggcaatgaatggaattcacgtaatctttgggctgacaagcacctaaagcgtgttccatattcacaaagacaatgtggagacttagtgttctattaccaaccaggtacgcacactatttggcatgttgcgatttacttaggcaataaccgggtaattgaaagctggccaccacgtgtgatggttcaaccaattgttaattcacaaagaaatgtaattgctggtattaagcgaccatttatttaaggaaaaatatgaaaaaatacttagctattttattagtcagcctgggctttagttcattattgttaactcgccaaacagtacatgccgctgataatgatgatgccgcgacaactaatcaatcggctcctaagtatactggccttaaaaaagttggtaaacattatgtctattttgatcaagcaggcaagcaacgttttaaaaataccaagactaaaaaagcatattattggattaataaaagcggcaagatagttggtattaataactacgccaaggtaattagccaactacctgaaatgccaactggttgtgaaattactgccgtgacaatgatgattaattttgctggtaaaaaggtaactaaacagcaggcggccaagattatgccgcgcagctctaaccctaacaagggctttatcggttcgccttacaagaaatatccgctcggctattgggttgctcctaatggggtgaaaccagtagtgaagcattatcttggtagagcacagaatatgattaattgtggtttgcccgcaattaaggataagctgattaattcacacttggtggttgtttgggtagggatgtttgacggcctctctaaccatgctattaccttgacgggttaccatggtaaaacgatctattataatgatccttggactggaaccaagcggaaaatcaagcaggaaatttttgcaacgcattgggctttagatgctcatcgggcgttgagttattaattttatgtaaatatatttactttttagtcatgttgatcaagccactttcgcagcatttcaacatattcatctgttttttctacaaaagacatgtgaccgcagttttcaaatagctgccatttactgccagcaagctgatcctgcatcgttttagctacataaggtgtacataaatcatcagtcccactcgtaattagagttgggatttttattttgcctagtttttctgtgtattcgtaatcgtgcaagttgccctctggcgtatattcatttggtccccaggcggtttcataagctacaataccaccacatttttttcgcataacgcattcaggccacgttttcgtcatgtcaattgcatgttgattcatgaagtgctcattagcttttaagtaatcaggatcgttaaaattgctagtcaattcggcgcgatgaattgccgcctgttcttcaattggcaagtatttaatcatccggtgtaattctttgctccataaggaagcagacgacaaggttgaagacaagatcaagctttgaatgccaacaggatgataatcacacatgtagattagcgctagcatcccaccccaactttgtcctaataaatgtattttgcgcaaagccaagtgctcccgcaacgccatgagttccttaacccatgtttctttagtataaagttcagggtgatcatcagggatgctactcttgccgcagcctaactggtcgtacatgataatccgtcggttatcaatttcggctaatttgtccaaaacctcaaaataattatgacttgagccgggaccaccatgtagcaatacgagtggtgtcttttcgcttcttcgaccaacaatacgatagtaagtttcatagcccatgaaaggcatttttccttcgataatttccattttttcacctatttgaacaaaaacaatgagatattaaccaaaattagcagggtaaagaagattacccaatctctagctggtaaaggaatagcgatgatcgtcgaccttctttgcccttcgacatagccatgtgattccattccttgggccagattgtcagctgaatttaaagcaacaagaattgctttaaaatagaggaccggcgaccaaaaactgagataaatgccccgcatcatagcgctagttcggatctgtttaaccgccatcttcatctgcggaataatgttaatcgccgccagcacgccgtaggcaaatttactgggtaagtgcaggttctgctctaatgatcgggcaaagtctgtagcggtgttattacgtgtcacgcaggcaatcgtcaaggtataaacatagatacgcgttgacaaattccaagcataataagcatttggtgttggtgaaaaccaaaagagcgttgcaaagattgtaaaagcagcaataaagggcaagataatgagcaagattaactctttgattttgaatcgagtaataattaaataaactagcgcgaaggtgattactaacaaattagtaactaagctagcttttaaagatatttccagggaaataataaatgctaaaagaaattttaaactaggattcataagcttatctttctacatattttaagcgctgatccgcaaaaatcaggtggtaatcgcaaaattcagctagctcgtctatctgatggctaatgataaaaaacgtctggtggagcttttgctggctttctcgcattaattctaaaacgagtttgaccgagttatggtcaagtccactgagcggttcatcaattaataaaacctgatgcttagtcattagcattaatagaatctgtaatttcttctgttggccacctgagagagaataaacaacttggtctaagtgtttggctaaacccaatttatctagccattcattgaccttttcttcagtaaaaaataaatttctatcctttttacttaattctagttcatctttgacagtcacagctaaaaattggtcgcttgctttttgaaaaatttgagctacttgtgttaaatattttctagctgagatttgagcgatttccttatttaaataagcaaaattaccagtatacggaatcattttggtcattactttaaataaagacgtcttgccaacaccattagcaccagtaattagggtagtgccagaatgcaaatttagctcattttgcttaagcaaaagcttgttttgtctaatttggacttgttttaaagtgaaaataggctcactattaggtaagacaaaatgataatgtcgctcatgcaattttttattttgttcaaataaggctatttttttgctagcatttaattcaataacttcttgattatttgtaaactcaaaaagatggtcgcagacaggttcataatcgtctaaaacgtggtcacttaaaataatagtttttccgttgtgagctaaaatcgctaattttttaatcaaaaaagcacgtgtcttaggatcacaactggcaaacggttcatctaagagcaataaatctacatccatagctattaagacagctaaagcaactctttgttgctgaccgcctgatagagtattaatcttttgatcgagaaggtctgcaatttgggtgaaagctgttgcctgatctagtcgtgtttgatactcaccttcatctaactgtaaattttctaaagcaaagacaatttcttcacgtggagttggcattgtaaactgttcagccgcattttggaacatcattgccgccttttgtccgtgcaggtccaccatacctgttagtcgccctgcatatttgggatacaaaccagcgataattttgagtaaggtagatttaccgcagccggtcggtccaattaacagagaaaaaccatggggaatttcaatatttagatgattgataataggttctttttcataagaaaaagtaagattgttaacggttactttcataagcttgattgtacaagatgctttggggactgtctacaggtagagtttgttataagtagaacaaatcataaataatacttaatactaaataaagttttgatttataatgtaattatagtgttaccatattttatttaatttaaggaaggtggacatatggcagctgttgctttggaccaatatctggcaagtgtattaaagtcaaattcaacagataagaatgaaataaagttggaagctggtaatccagattttgatctgtttactatctaccttgaaaatcataatactggtattcatcgctatcggatggatgtttcaacgattttatatattgctaagggtactgtgacaattaagagtggtgaaaagatcattcaaatgaagtctgggaatgttttgctactgactgaaggttgcaagtatgagattttaagtcaaaaacctgatacggtactgataaagttgaagtttaagcgtggatttctatatcgcaagtattttaaagattttagctgtaagggagaacgtgaggttaaagttattgagcaaatcgttgatagcttagaaaatgaacatgttctttggctaaaaaataatcaaattactcgtgcttctcaagtgatgcaacatattattggcggttatttgaataatgatttgtttactaaagctttaattcaggctgagttgaccactatgttgattatttcaattagaactcagcgcatggcaacaccgactagtttggataaaactaagtttgaaaagaagaccttagataattacatcgatcttcattttgccgatgtctctttatctgacgctgcaaaatactttggcttcaatcctaattatttctctaatatggttaaggctaagactggcaagagttttgtggatcacgtggatgatcgaagaatgcaagaagcgcgtgaattgctggctcagcctgatatttcacttagagagattattggtcgagtcggatattcgagtaagtctttcttttataagaaatttaatcaatactaccacataacaccagcagcgatgcgggcagaattgtttagacaagcaaatatcaatttaaagtaaaaaaataatctggacgaaagttccagattattttttacatattttctaagcgtttaatgcggtctgctgttggtgggtgagtatcaaacaagtgcgtcaaaccgtgattgtggaatggattttcaatatataatccagcactactactatcagctactttcattggttggctattttcaatcttgcgtaaggcagaaattaagccttgcggattacgtgttaatttaactgaagatgcatcagctaggtattcacggttacgcgataaagccatttgggctagggatgcagaaagtgggcctaagatcaacacaaagaccaaggcaaccactttaaaaattatggctaaagcattactgtcacggtcatcgtcgtcatcactgcgcacgccgccccagaaccaaaaattggacgccatattagagataaaagaaatgaccccaactaataccacggcaattgttgaaagtaaaatatcgtagtttttcacgtgtgataattcatgccctaagacgccttcgagttcttcacgatcaagtaattctaaaattccttgagtaactgccaccgcactatgttcagggtcccgaccagttgcaaaagcattgggactaggatcaggaataatatagacccgtggcattggaacctgtgccaccatcgccatatcttctacgatatgccacagttccggattgtcggcttcatgaatttcttgcgcgtgattcaagctcataatcatgttggctggattttgccacatgatgaataagtagactaaactaccgatcaaagcaatagtaacgcccattgttggactattgctccaaagataaccgattcccgcaccaactaagcctaagatcaccaaaaagatgaacataattaacgccgttttgcgtttattacgagcaatttgttggtaaagcatggttaaacttccttaaaattaaaacttaacttgaggcacattcttttcttcactaggagtttctaagtagttaatcttagtaaagtggtgccacttggcaacaatatttgatgggaaagtaagcaacttttgatcatatgttgctacagttgaattataaagttgacgagagtaagcgatcttgttttcagtgttagtcaattcttcttgcaattttaagaagttttgattagctttcaagtctgggtaggcttcagccaaagcaaaaattgacttcagagaatcagtaatttggttagaaagcttcatcgcttcttcatggttaccttgaggcacattaaccaattgattacgtaatttgactacttcctcaaaagttgatttttcatgcttggcatagcctttggtggtttcaaccaagttgggaattaagtcattccggcgcttaagttgaacgtcaatttgactccaagcttcttcagcatagactttcgctctttgtaaaccgttgtaagttactatgtagatagccacgattaaaacaataatagctaaaatgatccaaattaaaggtgacatagtttttcctccataaaatatttatttaattttatcgttttcgaatttcttgagcaataaaaaagaatgtcaaagcggcattcttaacaaaaaatattaaattctgaagattaatagtaataatccaactgcagttaaaataatcaaaccagcaaattgcataatagtccattgaataaaaaactttttcttacttacgctaccgtgttggttgaaagtcttaagaactaacatattagccattgaaccgatagcggaaccaaaaccaccaatgtttgaacccaagaataatgcttgagcataagtggtaaatttaccaactaaaatggttgatggtacattgctcattacctgactagagataattgaagcaaagtaagttgaaatttcagaataaacggtgccatgaattagatttacgataagagggatttgttggatatcgctgatgaagatgaagaagccggtaaaggtaagaagtaaggcatagtcgattttgagcataatcctaggattaattgcaagggctaatgcaaccgacgttagcatttgccaaataatatcaatggttctgaaaacaccaaagaagaagaaaataaagacagcagtagttatcagcgtcgggcgccagctgatcttgattggctcagctttttgcaccggaatttcttctttaggaataaacagaaagactaatcccatgattagcattgaaactactagataaggtacagaccattcgaaaaattttaatgggctgacatcaaagcggctgactgagaaaatattgtgggggttgccccaaggcgtaaatgctgccccaatatttgcgcccatcccaatcaaggtaacaggcaaaatctgtggcaatttataacgcttagcaatatttaaatacagtgggatcaaggtcaatgcagtaatgtcattacctaaaaacatccccgaaatgacagccaacaacgaaaacagcgtgttcaacttacgcgtattatcggcaatacttgtaagcttgtacgctaaaacatccagaacatgcaagtatgcatagatctggataatcgttaacatcgcggcaacagaccataatgtatggaagttaatgtccgcaaaccgcggtctggcaaaaaaaagactgactactgtaatgatcacagtaatctgtaaaattctatctttagcaatattctttaagacggtcataaaaggtcccccttacgtattacaatcgtctaaaaaccctatgtaccattttgagcctttttgttattgcatgcaatgataaatttaaaaaaatatcaagattagcggtatttttgagcatatttttagttagttggaactagtcgtgctatacttaaataagtaagttaataaaatttagattgaaacgaggaaacaaaatgacagagaatgcaatttcaatcaatattaaaccagatgctgcagaaatgattaaaagcaagatggatgcagatcaccaaattgttatcttggctttagatgatggttcaaccaagtattctaaaaaaggcggcacttgtactattggcgacagcttccagtttgtaatccttgctgaaaaagatcctaagtataatatttcaatcgaaaataatgctggtcttgacttgtatactgctcagccggaaacaactttctttgaaccaggtctagtggtaaatgcacgcaactcaactttgagtttatcttcagacagcggcattattgatggtgggatgaccgttacccaatatgaacctgaagcaattactgctgatgatctaaaaaacggcggtcaatgttaaaaaaataaaattaatcatagggacgagggaatgacctcgtccttttttagtatagaattaagaaagtgatttcaatgtaaggggggaagaacaatgacttttgtcaaagaaataaaagcaggtagtcgtgaattttgccaaaattggctgcggtatctgctactttttatgggattaagtttatttaatcaatttattgttattccactttttcgctatattacaacctttgttttgcaggctagtgctattccgttcgtatcttatcgaaatgtagtgacgatcattacgacgcatacggttgcctttttaattttgataattgagttgctgcttttattagtaatcttgtatgcgcaattagcttatttacttcatggcgtttgggatattaagcatcaagtttttacgtggaaaaatagttttattcaaacttggcaaaatatcaaaaaaattcgtttgggcacgctttttattttgatgctctattttttattggtagtaccgttagccgatgtcatctttagaacaccacttttaagcaaagtgcagatttcagaatttatcttggattatctgacgagaacgccaatcttgttagccgttttgattgcgttttatttagccgctttgatccttggtgcaaggctagtatttgctttacccatcatcgtttttgaccacttaaagtcagtgcaagcagtaaaaagaagttggcgattaacggcgcactaccgttggcggacgatttgctggaggattattgttttagccgttttatctgcagcagtcatgacaattttctatttagcaatgtattgcctgcagctattagttgatttattacctgggaaatgtccgttaattttagccattagcaatctttcgcttgttcaaattattagtgaagtagcgttagtctatgttagtgtactgggcttatctattattttgaaagctttaaggcaagaaaagataagtcaaacaggtaaaactaaaaagataattctaagtacattagttgtgtttgtactagtaatgattaatgcaatatctaccaattatttatatttgactagtgtaaatgctaaagcgccagtaattatttctcatcgcggcgttgatgataaaaatggcgtacaaaacacgttacagtcattaagaaaaacggctaaagaaaagccaaactacgttgaaattgatgttcatgaaactaaggataaaaaatttatcgtaattcatgatgagaatttattgaagctaacgggagttaataaagccccgaatgatttaactttacggcaattagaaaagttaactgccaaagaagacggctatcatgctaagttagttagctttgatcaatatcttgaggaagccaaaagactgcatcaaaaattgctaattgaaattaaaacgacggctaaagattcgaagaaaatgctgcagcgctttaatcaaaaatatggcaaaacgattcttaaaaatgcgtatcaagtacaatcactcgactatcgcgtggttgaaggactgcacttaattaatccacgtttggttgtcttttacattcaaccttataattttacttatccgcaaagtgttgctagtggatattcaatggaatattctaccttgaattcagactttatttggcaagcccatttgcaggatcgtcctgtttatgcctggacagttaatgacgaaaaattaatgaagaagatgatgtatcaacaagttgatggcttaattactgatcgagttgatttagctaaaaaggcaattaaaagtttccaaaaggatgctagttatgctacgcgaatcttaaattatattgttgtcctgcatctgtcgaaaaattttgaatctgcatgaagacttgatctgaagggctggacatggtaaactatactagattttcgaaaatctgaaaggaagtatagcatatgcgtaaaggtgaaaattacaacactggttgtgaaccaaatcaaagacctaagaacaagagaaacgcaaagaagcgtgttgctcacgtagcagcagttgttgctttcttgaacaaggccgcaaaagacgaaaacaagtagtctttaataatattgaaataaaagctaggagctgacgcttctagctttttttgtgcttactgaaaaaattaattctaagtgtataattttttacggtaagttgaataaataattaaaaaagcccaagtcctttgaatttggacttgagctcaaacaaaaagaccagtagtctgatgttaagaacaaaaaacacattagaagctggtcttttatgaattcaattgtaactgaaatcgcaaatattataaagtctgaagataattatattaagcgtgaaagaaaaataatctgtttcttcttaaacctgattaaggaaatcatggccttggctttagctaaagttgatgatgaaatgattaccaaggttaaagcacagcaagctcttagttaaaatcacgccacttaagcgttacccaaaagttacgttagttgtaccagctcataatgaagaattagttattagtaaaactacgcaggcaattttaaatttgaattatccggctgataagttacaaattttaatctatgctgataattgtactgatgatactgctaaaattgcccgggaaataatcaagcaatatcctgaacggaaaatcaatgttcaagtaattgaacgaacaggtagtggtggcaaagctggtgtattaaatgatgctttgaagattgcccaaggagaataccttggtgtatatgatgcagatgccatgccagaagaaaatgctttgtattttttaattaaaaagattttggaaaatccggtgagatataaggctacttttggtcgcaataagacgagaaatgcgcggcagaattttttaactaagtgtatcaatcaggaaattgttgttacccagcgaattcaacactgcggtatctggcaattatttaagattggtcgtattccagggactaactttattattaatactgattatgtcagatcaattggcggctggcgcaatggcgctttgaccgaagatactgatatttcttttaaaattatgggctcaggtagtttgattgccttagcctataattctgaagccttccagcaagaaccagaacgcttaaaagattattatttccagcgcttgcgttgggctaaaggtaactatgaagtggtgatcaataatttttgccatctttttgataaaagcaactggcgggttaaattagagactgtctattattcctgcacttttttctggtttaatttggcgattgttttatcagatctgatctttttttctaatttgattgccttaatcgtccatctttggaatcctgcagtagtaataccatttacaatttcgcggagtaatattttattagctcaaattctgctctttaattggctattgatggttttgctttatattttgcaaattaacctagcgatgactacgcaatatgggcaggcaactgacgaacagatttggctagccttagcatcatattttacttattcgcaattgttcatcattgtatcaattcatgcggttacttcagtaatgctagatcgcgtttttcatcgtgatagtactaaatgggttaagactaagagatttgcggattaggtgatgagatgaaaaaaagatggatgctactaggatttttactcgtaacgattgcatttaccggtattatgatctatatcagagcagataataattcagcggtgcgtaatttttttctacattcttggcataaaaattatgtagttgaagaaaagaatcttgcctatattaataccacgcctaagcaggaacaagtgacggttttatctgaaggccaaggatatgggatgtttattgcggcgcatgatccagcagttaaagaaagcaactttgctaagctagtgcagtattatttaaaacaccgggatcgtaatacgcaattgatggcttggcggcaaacaaagaaaaatggaaaatggagcagtgaacgcaatagcgctactgatggggacttatttattgctaaagctttgtttttagcggctaaaagatggaaaaccccagcatatcagcggcaagggcaaaaattaattgccgatattttgcgttatgaatataatccgacaacgcacgctttaacggtgggcaattgggccgattctaagtcgaagtattataatttaatgcggacttcagatgtattgccgacaatgtttgatcaattttatcgtgaaagcaatgattcgcggtggctcttaattaaaaaaacaatgctcaagcggctcaatcagttgagtcaccagcataagagtggcctagttccagactttgcctggctgacatcaaaagatgctaagccagttaaaggaagggttaccactgatcgatatgatggtgattattatgccaatgcttgccgggtgccaatggatttagcatttagtaaggataaattagcaaagaatactgtacatcgcttgcttaaattttttagcaagcaaaatacaattacagcaggctatactttaaaaggcaagccggtcaataattatcaatcagctagctttagcgcgccaatttatattgcggtgaatgaaaatcgcaatcaaggctatgataatttgtttgcttcgcagcaatatatttttgctaaaaaattacctaaaaataattactatgatgcagcactaacgacgatggcaacgatactgacaccggcgcatagattttaagaggcaaaggcctctttttatttgcattgaaaatcaatctttgataacatagtaaaaattttaaggaaaatgaggaggacaaaaaatgggattaaatgcatacattcaaggttttaacagtttagagtcaattgatcgagcaccgggctacttcaagtatcatcaccactcagtagctgaccactgcttcagaacagcggaattagcacaaatgatgggagatattgaagaagtaaagggcaaaaagaagatcaactggaaggctttatatgaaaagagcttgaatcacgattatactgaacgtttcatcggtgatattaagacacctgttaaatacgctactcctcaacttagaaagatgattggtgacgttgaagaaacaatgaccactaagttcattaaggatgagattccagaagaatttcaagaaatttatactaaacgtctctcagaaggcaaagatgatactttagagggtaaaattttatcaatctgtgataaattagatttgttatatgaagcttatggagaaatcgaattaggtaatcctaacccggtttatatgcaaatgttcaaggaaagtcttgaaacgatcaagaagttcgacgatttagtttgcgtacaatactttattaagaaaattttgccagatctttttaaaggtgatttcgcgggaaaggataagatgcaacgaatagcttttagcattctattgttaggggatgattaggtgaaatttcaatgtagttcatgcgggctgcgcatggactctttgcattttaagcaagaggggttaatgaatcctaagttgaccagtatttgcgacatttgtatcacgcgcaacctgaatccagaagattacgcaaatgatgcggtcgcagcttttgctcaaagcttgctttacacgtttgtcggtgcaaagaaacaagatcaatcaggttttattgtgaaaaataaaaaggaccgtaaaaaatacgaggcctttttacaagattatgatggcaatgaaatcgcccgccaacagattaaaaggtctgatttgaatttggcggtaattaaaagcgaagatggcaagcttaattatgtgcctaaccaaggcgtaacttttgagcaaaatttaaagggaatgggtttggagatcaatttccagttaaacgaagttgattttattgatcgtgaacgcattcgggccaagtataaataccgctgccaatattgcggcagacgtggccacagcgtagatcataaggatcccgtttctcttagtcacaacaacagcttagataatttaactttagcttgtgcggaatgcaaccgaattaagtcggatatgccttataagttgtttattcaactgaatgatcaaatttctgagatcaataaaaagctagttaagtatgaagatgcgctgggtactttgagagaagaatttgagcatcgtcggcgctatttagcggctcaagtacaccttaagggtgttatcaatgatcctgagctaaatgcgattagaaagcaaaataagagcttacaggatgacattgatagtttacaaagtgattatgatgatttgcgtcaaacgcgcaagacgtattttgatacgggctggaaattagctcgcattaaggaaaataaggatattatttaaaacgtaaaaaagcgctattttttgtaaactcaattcaaaataaaaaatgagttttaaaaagatcatccccatataggaatgatctttttaatttttatctatctaattcgatcttctggatcaaataaatatttgtcccatttaacttcattttgaacagtagggtggaagagcaagaatgctagcaacagttgaccaacgtaaggaattacgcccagccaccaccaaccaccgttaaagcctgcgtcgtgcagacgacgaacagtgtgacctaattgtgctaaaaaggcccaaatagctgctgcaataaagaaaataataaaaatgatgaagattacaccgattaccttggcatcgccagaatcaaattcagtaacgctgaaaggagctaaaagcatgaaagcaagtaggtaacaagcaaatacgccgattgtcatgataacttggctaattgcagtacctacccagaatgaggttctagtagatctagcatcccacttaaagcagtcaaagaagtgttccttcaagatttgaccaatagttggtacaggaacattactttttgcgccacccttaggataatcttgatcgctgaacaagtatttgccccacttaacttggcgttgaacagatggctgcaattcaagataaaataaaaacattgcgccataaccagtgaaggcagcccagtaccaatagccgctgtagccaacatcgtgcaaacgtcggatcgtttgtcctaatgcagctaaaaatagccacagataaacaacagccgcaacaataccatcgactattctaatgccggggttgatgttttggttaaaagcatagaagccaagaaggatgcataagatgccgataacaagattaatcaaagtgctccaccagaaagatttacgcgtagttcttgctttccagttgaagggatgcaaataagcctcgttcaaaatttgcgcaaaactttctgcaggcggcagtggcagactttcgtcataaggcttgataaaataatatactctatcattcattttacttcctccaaaaattaatttgttataaattatacgctaaaaaagccgtgaagcaattaaacttcgcggcttttttgatattagaattcattatttctaaagttgctcaagaacttttgcgtcttttcattcttaggatggtcgaataattcttccggtgaaccttgttcagtaatgataccgtcactgatgaacaatacgcgatcagaaatactcttggcaaagcccatttcgtgggtaacgatcaccatcgtcaaaccggttgtagcaagcttttgcataacgtctagtacttcgccaaccatttctgggtcaagggcactagttggttcgtcgaacaataaaacttctggattcattgaaatcgcacgggcaatagctacacgctgctgctgaccaccagataattgttgtggcttagccttaatgaaaggatccatgccaaccttttctaggtttttcatggcaatcttgcgtgcttcatctttagaacgtttcaagactaattcttgaccgaccatgcagttttctaaaacatttttattttcgaatagatcaaactgttggaaaaccataccaacctttgatctaaaggtattgcggttatagccgggatgcaagatatttttaccgtgaaaatcgatctcgccgccagttggttcttcaagcaggttgatacaacgcaaagtagttgatttaccaccaccagaaggaccaatgatcgttacgatttcgcctttattgatgtcaaaggaaatatcctttaatacttggtgatttccataagacttttgcatgtgctttaagcttaaaattacttcgtttgattcagtcattaattatttgcctccgcatcttttggagtaccaacttggacttggttagccatcaagttgtaattcttattaccttcaagtctcttttcgataaagttgaagattctagtaatagtaaaggttaagatcaagtaaattgctgaaatcattaagtaagttgggaagaacttgaatgattgactggcaatagtagtaccaacgaagaacaattcagaaactgagatgatactcaatactgaagtatccttgatgttaacgataaattcgttggtgattgatggtaaacagtttctaatagcttgaggcaagatgatatgccacattctttggttgtgggtcataccaagtgcactagctgcttcgaattgaccttctggagttgaaataataccaccacggataacctcagctaagtaagcaccagtgttaattgacacaataatcaaagcagctacagttctatttaaattcaagtgccagaattgggcaataccatagtagattacggctgcttgaaccatcattggtgtaccacggaagatttctacataaacagataataaccacttaactacgttcaaagtccaacgcttgccgcgagtagttggagtaggaatggtacgaataattcctacaagcaagccgataaagaaaccaacaatggtaccaactaaagctaaaagcaaggtcatgccaatacctgacataatcatgccaccatattgcttccaagtagtaactagccagttttctttcttagtttcgttaccagccttaggttgttccttgatggcttgtgacattaattgatcacgctttttattagaaatagttcttaaagtagcgttaacttcatttaaaagcttggtattaccctttttaaccccgatactagttacggaatcgtcatggtcaactttgaagccagccattttgtttaagttaactgcaataatgttagggttaacgttgtggtaactttcaaattcaatatcttcagcaacataaccatcaatggtgccagaagctaaactttgacgcatggctgaaaagtcacgcatagctggttctcttttagcaccttttaattgcttgattaaatcgtagtgcaaagttccttgttgtgcggttaacttggcacctttgaaatcagtcaacttcttagcattagaatatttacttgccttattagtaattacgacgaaagtacttttacgataaggttctgagaaattaattgccttgcgtctttcggcagtaggagacataccagcaataatcaagtcgattttgcctgatgtcaaagctggcaatagaccatcccattgagtcttttctacgattacttttttgtgtagtcgtttaccgatgatcttggcaatttgaacatcataaccattagcataggagttagaatcatcaattggaacagctccattagctttggttggctgagtccagttgtatggaggatagtttgcctccatacctatttttaacgtgccagaatctttcttagcagcttgagtctgattgctactaagagaaaaaccgataaataaactgagtaggacagacattattacagccatccatctaaatcttgacttcaattataaaacctccaaaaatagttttaacataaagccaacacaataaagagtaaacaaaaacctcgctcttccaaagaattgcgagggtcataatcatcagtgtttaaaccaaatcttatagcgctccctgggaactaaccaggacagtctatagaatattcttctatagcccaacagattaacacgcgaatattaaatctatttcggcggcaacccctaagttaactatcattgttttcgcgaactcaaacttaacttgtgattgtcgcaacctctattgcattggaaaaatatttaactaatgaagaatactagaagaaaaagttaaatttgtcaagcccaaccattattagtttcataatttctctttttcatatcagaaacataaggatttcctgctacataaaaacgtaattttttgttagcccaaacgggatcagattgattgataccaacacgcgctgcagcaattatttcctggggaatttttttatgacgatcatcaagatcaatggcgaaaggggagtctgataaaaagtgcaaattccaatttttatcatgaataccaaaagcttgcatcatttttgcgggaccattagtcaaaagaacgccatctttaccatgacggttcttgatcatggtctcaattcctaaagtgggatcgattgcacggattaaaacaccctgtggttcattctgaaccctagtggcaacatcaaagaaaaaatattgacgttgcgcgtagatatagatcgttccgcctttgccgtaaagtccttcattcgctgggctacgacgaccgccataagaatgtgcagcgcgatcctttttacccatatatgcttctgcttccacgatatagccgcctaatttttcttgaccattatcaaaagtaagcattcgcccaattaggtcttttgcaatataatcggtagtgttagtagaaaaataagttgaataattcatttttgacctttctagaaaagagataaaaaataatgacagaaattaaattagttcgaatttatgaccatgagcaacctgctggttatcggattttagttgaccgtttatggccacggggaatgagcaaagttaaggccgatttagctgaatgggataaacaaattggccctagtaaggaattgcgtcagtggtttaatcatgaagatgaaaaattccctaagtttaagcaaaagtatattgaagaacttaatcataatgattatacagcggaatttttgcaagatgtaaagaagcatttggctaaagaagatgttcttttcttatttggtgccaaaaataaagagcacaaccaagcagttgtactcaaagaatatgtattaaatacgctaaacagttaaatatgtttgtgaccgtgttttttaactttccaaaagtggaagagaattgtcaaaattaagatcgcaaagacaataattgcaaaaacggtgtttggcaactcaaatctcaatggtggcagagctagtagcaattttaaagcgatgattcctatcaataagtaagccattggctgcaattctggaataatatccattaatttaatgataatttcggcaactcctctcatacagagaatgccgatcatgccaccgattaaaacaacaacggggttatcagacacggctaaagcagctaaaacagaatcaattgaaaagacgatatccattgattcaattgaaataaccgtacgccagaaaagagatagcacatgtctctttttctttttgcctttgtggcgagctgcttcgcgctcttctttttctttctcatgttcggcagcttgtttagggtggcgttgatcatagaagaatttaaaggctaggtaaaaaagataaatactaccagctaatttaatctcccaaaagttgatcagataagtcccgattccgataacaataaagcggaataaataagcaccccacaagccataaaccaaggacttgcgttgttcagctttattaggtagcacctgtgtctgtgcggccaaaacgacagcattgtcgactgataacaagcattccatcaagattaaagtcagaatgatcatccagtctttgccactggttaggacatgtaaccagttattgccgtcaaaaaagggtgcatatagtttaagaattgacatgtagttgcttcttttctaatttaattaatctgattttttctttttgtcccagacgataagtcccaactttattgttggataaaataactctttggtcaggaataaaaatcaaaacagggtttaatgctacggcgtgtgcaactgagcgagaagatgtggcttcggctagtgaattggcgacgtcaccataagttaacgtcacaccataaggaatatgctggacaacggctaatacctttcgttgaaattcagtgccgaattccgaaatatcaataggaacatcaaaattctttctgataccagcaaaatattcctttaattgtttgatatgaggtgccatctttttagggtcccgcaccaacatgcggtgagggtagaagctaaaaataggtgaaacagtttcatctcctttaagtccgacgtaagttaggccggcttctgaagctgttaaaaagtaggtccatggctcaattgtaacgtaatcatagtaaaaaaactctgtcatgtgtaacatctttattaaaaataattagtctaagaataacaaactaggaaagttaattcaaattctggaatgctgttaatgcatccccaattatttgcgtgacaccaggggtaggaatttctgtcttgttgatagagtaaattttggcgtcttctttgcgataagccaagagctgggcaaaaggataaactacaaaactcgtcccacaaatgatgatcaagtctgatttttgcattatttcaacggactggtttaatactttcggatcaatgccttcgccgtataacacaataccggggcgaataattccgccacaatctttgtgtaaatagcttttagcatattcttcataagaaacaggttgatgacatttagtacaataaatattatataaattgccatgaaattctgttacatgttgattgccagccttagtatccaaagtatcgatattttgggtaattaaattacctttttcattacaaaaatgggcgattttttcatggattaagtttggtttagcagtaggaaagtacatattgttcatgacaaattcatggaaaaattcaggtcgattgaatagcgtactatcgctcagtatagtttcgggactttcttgcacgccatcatagattccgtttttagagcggtagtcagggatacctgagtgggtagaaacaccagctccagttaagaatacaatatgttgggcattattaatatctgtttgtaattctgctaaatccatcatataatgtcaccctccgtgaaagtcactactttaattataaatcattgttttgttataatgactgaaaattgaaagcaccaaaatcaagctcaagtcctgtcactattgagctttcttagacgtaattagtttttatatgatctgtttcagtgcaatttgtatgaatcgtggcagttggttaataaagtcattgattacttcatctatcttttcaaaactattctgtttaagctcttttaattctgaaattaagtagaccaatgcatctacgaatctaatatcaggtaaggattcgttcattagatagaataaatctccgattgtcttatcatctgtattttgtctttcctgccaggtcaatagatcataagttattgctgtaactgcgatatagccacattggccatcatagctttgaacttgagatttatctaaagcaagatattgcttagacgtcttaaaatatgtttcaatttgccatctacgaccataaagttggatgatttcttcagggctaagctttgtctgagtagtagctaaaaccaaatgcttgttcttgtttccacggttggagacaaagacgagctttaataaaaagctatgtccatgatattgagcctcaactatgcttgaataaagataatgtttctttttacggatgtttgaagcagccaaacgatcatacaagtctttaacgctatagcggcgatggcgataaatgtaataaatctttgaactcttcttgatcatgccaagtccatctaaaccgatcttctttaaaatccaaaacattcttggagaagaaaaccaagaatcgaataagacgtatttagcttctactcctaatcgtaaggcttgtctaatcaactctacagttacatcattcatctttctctgagcttgatttctccttttaccagaaattgaacgttcatcagcagtaatgggagcagctccaatcatatttttcttggttttggttgacatcaaggcaaagttaaccggcaagaaggtattgccatcgctccagcctaaagttaaaccacgatatccgttcaaatactcatgcttgtcatggtcatagactttagctagcaattcggtctttttagaaaaagaccgagccatcagcgtatcgtcaacgataaaagcaagtcggcgtcttttatcgataaatggttttaagcagccaatgagccgggctgcaatcaagcataatagtttttgccagttgattcttccatcgttaagtacattgcgagcagttctaacggaaaaacgtttgtcatccttagctctgaataaagaaagccgagcaaaatgtactgacatcagccaagagataatcatggttaatgaaacggtgtatttacgcttaaaattgacttgtttagttaacttagctagaccaattagattaataaatgaagaaattaaggatttagtatcattttctgtgtcgatttgttctatactgttcattgcgcaggatctcctttactttttaggtcgacacttaaagtataacgcagagagagcctgcgtttttatttttgataagaaaaagccaagaggcgcggggaaggagcgttaatcttagctttcaagtttcagtataatgattaaaataactaaattgaggggatttttatgaaatatatgacgtatttttatgtagcaattgatattttattagtagtttatgcttgttatagttggtattggcaagctaaagttgattttcgtggtcgctatcgtatctcctcagttgtttgggcgctaatttttatctggctgggctttacatggaattacattgaaaaaggtgatccaggcctgagcgtcttcttggctctttttatcttaattagtattgtcgatggtttttcaggatttagtaaaaagcggatggtcgtttcaggctacttcaagcgtacagttaagtatgatgatttagccagcgctactttaatccagatccccaaccaagagaagccattagtgatggcgatttttcgaactagcgatggtaaggcttatatgatgcgctttaataatgaagttaatagcgtaattaagcaattacaagaatatgctggtcgagaaattcctgtcgaagttcaatcaatgatgtaattacaaaattggagaaagcattcgcgagaatgcctgcaaagtccgcaatgcgcgactttgcttttttatttcttccttagttagtaaatgcgagtgtttcatatcttcttcaaaagctgccaccattttctggttgaactttttatcataaaaaacggcattatcttcaaagtttaagttgtaagaacggaaatcttgattcattgaaccaactgaagaaaaatggtcgtcgacaatcgtcgttttggcatgtaaaaagccatcttcgtagatataaattttgacacccaagcgagttaattcgttggcataccactgtgtggcgcgataaataaaggggtggtctggcttacatgggatcataattcgtacgtcaacacccgatgaggcaattgtttgccacgtagcaaaaacggcatcatcagggattaagtatggtgtttgaatccataaccgtttgcgtgccaaaagcattagccgcatcataccgttacgcatatatggtgcataacgatcaggcccatctgaaatgatttgcgttgcaacgtcgccttcgtggatgtttttttcatcaagatcaggaaatagagtggaattgaaacggatgagctgttgattattagtgatagaggcgttccagtccatgacgaaacgctcttgcaaaagcagagaggcagaaccaacaattcttacctgactatcacgccaatgaccaaacttcttttttttgcctaaatattgatcaccaatattaaaaccgccagtccaagaaattcgcccgtcgatgacaacaatcttgcggtgcaagtggtagttaatgcggtaacgggtgatcatgttgcgtgaagtgataaaaggcaaaacttccccgccagctgcccgcaattgatcgaaccatgctttagtagctcccattgaaccccaggcatcataaattacgcgtactttaactccttgttttgcttttttaatcaatagttgcaaaacacgattgccgatattgtcgctataaaaagtgtagaactcaacattgattgtttccttagctcgtaccatgtccttaagcatgtcatgaaagaaggtttcaccttcggtatagagcttgacctgattatttttagttaggggagcttcttgttggtggttaaaaaagttaattgctatattaccagcctttgaagtgtcagaaggactagtatttttaggtgctttagcaatcgatttttgaacatttctcaagccaatgtgtttttgcttattgatggcaaaaatattttcctgggaaataccccgaccaaagaaggcataaagagtgatcccgactactggtaatactaacaggatgattaaccaagcccaagtggttgaaacggatcttctacggtggaagacaacgtagaaggctaagattgtgttggtaatgataatgattctaacaaagtcatgccaccagatcataaactcctccaaaattaaactacttttttaatttaagaaacttgtcaataatatcgattacaaacggattgtcatgcatccaactatgttcggcgtcatctttaccgcgtacttctacttcttgataaaaatgtgcttttggggcaacgatatagcgaatgctttttgcggaaacaacagagatgaatttatcagtatttgtgttatctaaaacgttgccataaatattcaagactgagatatcaggattgaatttgcgccgattaaaaaacaaataaaggtagtgcgggttcatgacactaggccgaccactttcggtcaaatagttgacgtttgggatatcgcccaagtaagtgaccccgtcaaaaggaccagcgataaaggcacatttttttaaatgtgggaacgttttgctgcggtagtgcttcatttccgtgcgaataatacatggacaagctaatgaatgagcgactgcaatatagtttttaaaaccatatcttttagctaaaaagggcaggacgaagttgagataatagtcgatgccatagataccgactattcgctggcgaaaagcaacctgcacgataggatgcttgtcactagtccaagttccttctaatttgaaatttcctaataaatcaacggttacctttaaaaacttgggattgcccttgtcatgagtagcgtgtttcaccatcacgcgagtggtataatcaccgccgcgaaagccatggaaataaataatgggtacttgttttagatcgcttttttcaatgtttgccttattttcaatatggcgcttgtgtaatttgaggaaaattcgcgtgggagcgaaggtggccatcagccccaaagaaatcatgttaaacatgctaggttcttcttggaggtcatgtttatgatctttttcaacttcttcggcatatttttttgtgttgaaaaacatttttaccaccttctctttcttttttcctataataaaagttatgcaataagtatattttaccattgggtaaagattttggaattttagaggtagaaatgaagttttatgcagtcaaaaaaggacgtactccgggaatatatcggacttgggatgcagccaaagaacaagttgatggcttctctggtgcagaatataagtcatttgaacaaattaccgatgctacagattacttagattggaatgcccaaactcagagcgatgtcctgcaaaaaggtgaagataatttacaaaacgccgtaaaaagggtgcaacaaaagagtcaagaaataaaaaaagcaccgcgaaaaagggcgaagcagtataaccatgttaatagcaatcctgctgacttctttgcggtgacttatactgatggtggcacgcgcaatactggtgtttataagggcggtcacgttaaaaagaccgataaagcagcctgggcttatttaattgaatgggatgaccagaaagttcatggctccggtggtgaatatggtgctactaacaataagatggagcagacagcattgattaatgcactaaaaaagctgcttgagcttggttttaacgataaacatctattatttgttcttgattcgcagtatgtgttgaatgcgattaataagcattggctacaaggctggaaaaaacgtggttggagacgttcttctggaccattggctaatgtggcggaatggcaggaattagatcggttattaaaggaatttcctgatagtacgtttgaatggacgaaaggtcacgctaataatcgcggtaatgaatttgtcgatcatgaattgaaccgttatatggatcaaaaaatgtaagaaaaaaaggctacactgtagccttttttaatttaaaataacgccgccgaacaaaccactaaagaacttaacgatttgatcccacaaattttgtaaccagttgcggttttcttgggtattaaatttattgaagatatttttagctccattttgaatctgactggataatttcgaagcttgttgcttgaagttaccgtccttcaatgcccctgaatcacgaatttcaattagaagattgacaatttgatttttttgattgttgttgatggtgtcacctaagtggttaatattaatttgattgttgacaatgtcgcgaatttgactgtcggtaatgttttgcccttgtttagccatctcattcttggcaccggcaaccgcattgttcaattgagcatctgaataaccttttttgtttttattatcttgggtaatcccagacaaggtattcatttcatcttgagcggcattaacttgcttttgatttaatgtattgccatttttagcataggcagcataaactccagctaatgcccctgaaccatcaattggaatagcgctagtaacataaatgttggcatcgctgatgccggcggtcagggctgcgtttttgtactggttggcagtaatagtagtgatattatttttaccatcgtagtctaaaattttaacgttgattccgctgcctgagctggtcttttgaatcattgcactggaccaaacgcctgatgaggtagtgaagttatcaccggatggatttaagtatttaaccagatctgagccggtaacagtaattgtttgataattaccaccgtttagtggggcggttaaggtctttaatgtgccttgcttttgcgcatcagttaatgatgtacctaaggtaactacaggtgtatcatcatctgctaatactggcttagtaaatgagatcatcgcgaccacgcttaataacattgctgtgagtagtgtgataaatttcttcattttttcttcttttcttcctttttgatcgaatatttattcttgtaatacggaacattatactaaatatttttcaaaagtgaattaaacaacacgtaaaactttcttaatttcgaccttattattgaagatggtataataaagagcaacaaagggggacaatatgttacaagtgcctaagttaaccatcatcatgcctgtttataacacggcgcaatacttgccacgtgcttttgatgctctgcttaatcaagttgacaagagcttcaaattgcttgtagtagatgatggctcaacagataattcggttgaggtagccgaaagctatgccaatcgttttccatattttaaaataattaaaaagaaaaatggcggcccatccgatgcacgtaatgttgggatgcagtatctcgacacaccatatgtcacctttcatgatggtgatgattgggtggatccaggctacacatccttttttattcatgcttttgaaagtcatccagatgtcagcttagtatcatgtggctattggatggattatcctgacaaaaagcaacgcgttgttggtcgaccagaaggtggctatttaacgcgcggtgaaacttatttgaagttgactaatgtctttagctcaccaatgaaaggatatagctggaacaaggcctataaaactgccattattaagaaatatcatttgaagtttgatagggatatttcactactggaagatcagatttttaacgttaaatatatttctgtggctaaaggcgtctattacacgcaaaagccgtattaccactactggcagagaaagggcagtattattcaccagcctaatattaaaaaagttgcggataatttccggggaaattaccgggtttggagcaaaattatcagtacaatgatgaaagaccgcgaggaagaaaagatgcgtaagaagttagagcgacagcaggccttgcgtgatagtgaatagaggaaaacatgaaagaaaaagttaatggagtcgaaatttattatcataagttaggtaaaggtgagcctttgcttttactacatggacatcacttagatggcggtatgtttgataaaattgtggctccgctttccctttattacactgtctatgtgcttgatatgcgaggccatggtttaagtgaaggcgacattgctgaacactacaagactgaagtagaagacgtttatacctttattaaacaggttggcattgaaggctgctattgctttggttttgatgcaggtggtctggtggcaatgatgctagctagaaaacatccaacgatctttaagaagatgattgtagctggcgttttcgttaatggtgcaggcattagaccatatcactacttaacggaaggctttcatcgctttttgagacttgatcgtgacagccgcgtagagttgactgagtcctttatttcagtagatgacttgaagaagattactacgccaactctttgtgtagtaggtgaaaaagactgggttaaggttgagcatgtacgttggtatagccaatttatgccaaatgcgcggttggtgattatgccacggcagacgcatgacagttatgcagtgcgcagtttaaaactgctggatttgattaaaggattttgtaggtaatacgcgtggtgctagttaaatcgttctaggcaatatgccatattataagctaaaatggctatttctagccgctgctgaaagccagctaagctccttgctcggttattttcagcgttatagtaactgagcaaagaaaagtcgctttcaattgttcttctaattgccatcagttgatgattattatgttttttagcacctttcatgttttttcgatatggtgtccaaaggacatagcccataccttttaactcggcagctaagtcttttcctaagtagccttcatcgcctaaaagataatggttaattggatgagcattaatcatcaattctgtcgtttctttggcatcatgcactgatgctttagtgactgcgtagtcaagcaaatagccatcatcgcttactagcgcgtgcaccttgaaaccataataatagactttcttggttgctttatagccaatatcggctatgtcacggaagatcttaacacgataattacgaacaggctgacaaactggaacaggaaaactgtcaataattaaaaattctccagcaacctttacctcttgattccaagcttgacggatgcagcgaattaaaggcaaaagcatcttggctcgacgattaaagcgagaatgagataagccaacaaaaaatttacagaatcttctttgggattcaattccaatttcagtttgccaaatgagcatcgctaagatggagctgtcggaaagctttgtttgatcaatgttttttcgatgcgtaagcttatcaggcgcataaagattatatagtgaacgacaaattacatttaaacgactaaaactaacttgtaaatggtgagagaaacgattaagcttgaggtagttcaattagatcagactcttttctatttaatttacttacaacttgagtctaatccgattggacttttttattaactaaaacgatttaactagcaccacgcgtaggtaatgtggatagtattgctggttaacgtgatagttgctgcagttgctgttatatttggttttcaaaatagggtagaaacattaaatctgttcaatgccggtatagtttttatcacttttgggattgttttacttttaggtgcaattcctgtttatcaagatttcagcacgtcatcaattttaatgttcattgcaggcattttaattattgttagaattattatgctagctgttagtttaattaccaaagtgccaagaacagtaaatctacaggatattgcaatttcattgatgatcgctgcagtttgtttgatatatttcatgcacggtttaaatctgagcttaagtaatttagtcgtgccagaattagcattgattattggcattattttgttttattttaaaagaaagcgtcaataaaattgattgcaaacatggacatctcttcaatagaggtgcctttttgtatataatggtggtgtatacgatttttattcagaagaggtaaataatgaacaaggaagaacttcatcaattattgcacccaatgaaagttattggcttaggtggtaaccctgcattaaatgaaaaaattgcggcaattttacaccaaccattgatcgaaactgcggttcaccactttagcgatggtgaaatccaagttaacattggtgaatctgtcagaggttgtgatgttttcgtaattcaatctatccaagatccagttaacgaaaactttatggaacttgaaattgttttggacgcacttcaacgtgcatcagctcatataattaacgtggttgtaccatacttggcatattcacgttcagataccaagactcgttcacgtgaaccaattaccgctaagttagtggctaacttgcttcaattgactggcatggatcgtttaattactgttgatctacatgcctcacaaattcaaggtttctacaatatccctgttgatcacttacatgccattccacttcttggtcaatacttcttagataacggaattgctaccaaggaagatgatgatatcgttgtagtctcacctgatcactcaggcgctaagcttgctcgtaactttggtcaatacttcaatgcaccgattgcaattgttgatcaaagaggtgctcgctatgatactgaggtccacgacatgattggtgatgttaaggacaaaaagtgtatcatcattgatgatttgattgatacaggttcacgtatttcttcatcaactaagtcagttttggcagctggtgctaagaaagtttacgttgccgcaacccacgcacttctttctaagaatgctactggagtacttaatgaattaccaattgagcaaatcgtagttactgataccattaagcacaagcgctacccagacagaatggtcagaatttccgtagaccaattgcttgctcgtggtatcgattatgtatacaatgatcgttcaatccaccaaatctttgacgaacaaaaccgtttaaagtaaaattcttattgataatttgaataaaaaatgatcctcactatgaggattattttttattcaaaaaatcgggtagataagttataaaactatgtctaaatagtaatgattgatataattgatatgtgttgtatagaaagaaaaagagaaagttagaggaatagactatggcacgacggaaaaacatgaagagacggagagttattctaggtaatactttccatctgatcagagaaaatggaatggataatgtttctttgcaaatgattgcagaaaaatcaggcatttcaaaatccttactgcagtcatactatcctcataaggctaagttaactaacgacattatccgcaatctttttaatactttaggtcaacaagttaataattatgacatggctaatagcaatcttccttatgctagaactaaggcatttatttatacgattgctatcttggggatgcacgatgagggcttggaccgtattatttctgaagcttttgttagcaatgctaccctagataattggggaatcatgcttaatgaatggattaaggaaaatcatttatttgatgacattaacgttgacgaaagcgaacttgagacaggaattgcgtttgtaactagtggtattggccgtctatatcatgatcgcaaaaaacaccatttaacggccgaagctcttgctaactatgcaacaagtgcattgatgttcagtttcttgcattgttcttctgaagaaattgatcaagccttaaaagaaggacatgaaattattgaaactgctgatatggaagttgttcaccgagcaattgatacaatgttcgatgaaggcaaggaaattttcagctaaaggggagtcgccatggttgaaggcaaaagagctgatttgcgacgaatgggttatgagcaaaataaccaatataaacgtttgttggctttcgtcatctttttgattgctgcattatcattgattacagctacttttttaaatccaatctttatgaaaaaacagattaggactagctataatagggcagtagttgttcgccaagtgaataaaaattatgatagcctagctgatttgattaatgcagatagtgaagataattcaaacttactatcggatacgcaaactcaaccaattgccgaccatattattgattattctttgggtattcattggtttaaggttactagtttgccactggctaatcagattttaagcgatatcgatcaaggaattgctaaaggctcgtcaagtggggcacaggaagttaaccgtaaactgaaaaagcagggaactaatgcaccttacgcgattattaaagccttcaatttaagtgtgatcactttaggagcaaatattgctggtttattgtttatcgttaatttgataataattattgttaccattattacaatggtttcgctactcaacgatatgaagtcgcgggctacaattcgaatggtgattcatgatacgatggctgctggcatgtgggcaggtttttggctaattttgatttcaggcttgttagcacttgtgccagtaatctttaatgtcgataatatcgaatttggctttttgcttgagattggcagtagcgtctttttggaatatgtaattgctggggtaattatttacatcatttgtgcgataccatggcaaattacagctgctaaataagaatgagaaaacgtaatctgtagaatgattacgttttttgtttgcacaaagaatcatctttctttataattaaaaaataattaacaaatttcatatgtttatattttaaaagaattgggcgagtttatgaaaaaagctaaaattataaagacttttcttgctttcattactatgctttcgactctttttttgtttaatcagcctgttaatgcagccaataaggaggttgagactggctcagtgatgaaaaaaattaagcagtcgaaagaattagtagtgggcacctcagcggattatccgccactggagtttactaccagtgaaaatggcaataccaaatatgtgggggttgatatcgagttggcaaaagatattgccaaggatttacatgcaaagctagttattaaaaacatgagctttgattcacttttggtagcgctagagacaggcaaggtagacatggttatttcggctatgacacctaatcccgagagaaagaagagcgttgatttttctaagatttattacaagccaagtggcgaatatttcttaattaacaaacgcgatcaggccaaatacaaaaaaattaaagattttgctggtaaaactgtcggtgcgcaaactggtagtattcagtattctttgattcaaaagcaaatgaaacagtctaaggttaaaggcttaggcaaaatcaacaacttagttctggcattaaaatctaataagatctctggcattgtcatggaagaaatgactgctaaggcctaccaacaaaacgacaatagcttgatggctgtgagaagtgacttgcgtgaacaacaagctggtaacgcagtagcaattgctaaaggacaaaatgacttagtagctgctgtgaacaagactattaatcgcgttgaacaaaaagatttgattaataagaaatacttgcctgaagcagctaagtatatgaagacagcgcagaagacgaacacgatgactaaatatattccttactttattaagggagttggctataccatcgtgatcacgattttctcagtgttaatcgggatcatcttagggatgctcttagccttaatgcgtttgtccaagaataaattgctgcactggattgcagtttgctatatcgaattcattcgtggtacgccacaaatggtgcaaattttatttgtttactttggtgttggagcattaatttctaacctgtcagctgttgtagcggggattatcgcaattgggttgaactctggtgcttacgttgcagaagacattcgttctggtattgcttcagtagctaaaggacagactgaggcggctagatcattaggtctttctcaagctaaggcttaccgctatgtaattattcctcaagctttgaaaaatatttggccggcactaggaaacgaatttattaccctgctgaaggacagttcattggtttcagttattggggtaactgaattaatgtaccaaacggaattgattcagacttcgacttaccgtggtgttttacctttattcattgccatgattatttactttatcatgacatttactttaactagattgcttaattattttgaaagacggatgaaacacaatgactaaaatgatcgatatccaacatttgaagaaaactttcggcaaaaatgaggttctgaaagatatttctgcggaagtagataagggccaggttatctgtattatcgggccatctgggtcaggtaagagtactttcttgcgttgcctgaatgtattagagcgtcctacgactggtaaaattgtttttgatggaacagacttggctagtctaaaggatggtaaggaacttgatcaattgcgggaaaagatgggaatggtttttcagaactttaacctttttcctaatatgaatgtaattgaaaatattaagttggcaccgatgaaagtcaagggtgttagtgaagctcaagctgagaagactggactagtcttacttgaaaaggtgggcttggccgatcgtgcaaaacaatttccagctagtttatcaggtggtcaacagcagcgggtggcgatcgctagagccctagcaatggatccggaagtaatgctatttgatgagcctacaagtgctcttgatcctgaaatggttggcgaagttttgaaaacaatgcaagatttagctaattcgggaatgacaatggtgattgtaactcacgaaatgggatttgctagagaagtagccgatgaggtctggtttatggctgatggctatttacaagaaaaaggcacgccacaggaagtgtttgaacaccctactagtgaacgtgcaaaagatttcttatctaaagttttataatcaaaaaggctcaagcattgcttgggccttttaatttactcatctgtaatgatggggtttgataatacgtactgtcttacgaaaaaattttgatgccatcctttttgaattaatgcattaaaaaaggtgttttgattattaggcaaagcagtggctttgggaatgatgacagcacgtaaaatcttgttttgaagtaaaattggtgattgcacatctgtttcgctatttaaattagtggttgcttgattggtcggcgtgttggttgtatcctgctgaacttgataatttgtagtgtcattagtactatcttgcttaaatagcttgaatctgtacttctgcacgcctttaacgtcaacttcatattcatgtcctgcaactaggttagtatttgcgggtgaataagttaggatcgttctaaaattgccgtagccacaggagctgtaattcttaacatgagctgcagtagtaacaactttagtatctaaatcagtgatagtaattgttggcttatttttaatggttctatctgataaatagagcgaccacatgatatttttcccttgaagcaattcaatagggaaaagacgcatgctaggataagcaactaccggctgactagcaggacgaaaagtatcattaatgtttagtactttttgaacggaatagcggtagccatttgtaccataagctgccccaatgcctgtagtggttaaacgacttgaaagtagccaagctcggtgaccggtatctgaaccagttaaattataatggtcagtaattaagtcagtgatcacatccccagcggtttgctgtgaaacattaaagtttaaatttgaagtttcagaagtgtctttagctagcttccaaacaaatttggagatattgcttggcttagtttcactaggtaaaccatgttggttaatgaatgggttagcattaattgcggccattacagcagccgtaatctgcgcgtttttattaagtgtatcagtagtcgagatagcgggcagactgaacaatgatcgatagtaattgatataatctgtttgcgttttaatgtattttggatctaagcgacctaccttaaattttttgcttagatttggctttttagcataaatatttgcggcactataactagttttatcaaggttcgcatattccttttgaaaattatgaacttcgttaacttcttgtgttgtgaatgtcgctgcttgtgtaacttgtccggcgagggggataaataaagttgcggcagcggcaatagaaaatttccgtagaagcattttagactcccttctatggttgtcagtatacctttcattataaactataaccaatgaaaaggctttagtgaaaaatattccactattttgcgtttttctggtattctttgcgtataattaaagattggaacatttaaaagaggtataaaataatgactaaaaaattacaagttggtttgatttttggtggtaattcatcagaatatgaagtatcaattgtttcaggccgcaacatctataaagcaatcgacaaagataagtttgatgtgcacccaatttggatcactaatgaaggctactttgctaatgaagaagaaagcttcaaggttttagatgatccttcataccaagttaagaacccacataaggttaacaacatttctaacttaattgaattagaaaacttgccagaaattgatgttttcttcccaattgttcacggtaacttaggcgaagacggtgttttacaaggtttgttccgcttgatggataagccattcgtcggtgatgacgtcttaggagccgctgtaacaatggataaggaattcactaagatcttggctcaaagagttggtgttccagtcgctgattggatttcaattaagcgttttgaatacgacgacaagaagaatgctaaacttaactatgaaaaggtagcagaaaaattgggccgcgacatgttcgttaagccatctaaccaaggctcatcagttggggttagtcacgtaactaatgctgacgaatatactgcagccttaaaagaagccttcaagtatgacgataaggtcttagttgaagaaactgttcctggcaccgaggttgaaacagctgtcttaggtaacgacaagccaattgtagcaggtgttggtcaaatcaccaatgcaaaaggttcattctacacttatgaaaataagtatgatgataattcaacttctaagttacaaatcccagcagatttaccacaagaaattatcgatactgttagagaaaatgcacgtaaagtttatgcagcaactgaatgtagcggcatggctagaattgactccatgctcaccccaggtggcaaggtagtcttgactgaagttaacgctttaccaggctttactaatatcagtatgtatcctaagttgtttgaagaagcaggtgttccttacagcgaattgattacacgcttaatcgaagcaggtatggaccgttttgatcataagaaaactttgcttcacaagcatgactaaacgccaaaaatatagaggtagatttcaatgacgactaacaagcatgattttgaagaattggctgcaccaaaagcagctgcacaagaattaggaattagtgttgccacgttaagaaagtattctttaatcgtggagaaggtgaccggcaagagcgactattttgctcggactaagcaaaaggctcgtctgtatcatcaaaaagatattgatgacttaaaggcttttcaccgtttatctaaaaatagtggcttaactttgcaagaagccgctcttcaaatctatgctgttagtgaaaagaaacctgaacctgaaactaaagaaccagctcctaagcccgcttataacagtaccgatgtaatggatactgagcaggtggttaagttgcttaacactttgcaaaagacaatttctaatcaaaatgaggcaattaattctttgcagaagcaattgaatgtcattcaaaagcaaaatcaagatttaattgaagcacaaaagcaattagctgcgccacaagatgatttagataagtttgcggctttgccagatatttctggaattgtgagtgcggatgaacctaaaccgaagagtgaagaagaaaagcgcgctgaagttaaaaaagacatgaataagagtcaagaacaaatgcatgacgagattatgtctaaggcaaaggaaaatgccaagaagcgggctacttcaaatgttcaccgtacactagaagatatgcaattaacggaccaaaaggaacactggtggcaaaaaatctttaagttttaaacaaattgattaagaatcaagagctgacctaacaaaaggccagcttttgttttacagtaggcgtataacaattaataggaagtagaagtaatgaaatttaaatggaaaaagcgctatacgatagcagttatcgtggcaattgtaggagcattattgacggtcttgtcctattttgccactgatatttaccacaaggacgacgttgccgtgattaccgatagcaagatcaaggatactttgattgaaaaaagtgaagatgtgtataaaaatgcggatgaaactcgccagcaaattttgcacttaaaagttttatcgggtaagcacaagggcgaaacttacacgactaaaaacgtgtattatccttcgcaattgacgacgcaaaagtatcgtgcaggtcagagaatttttgtcaatatcaagaagggtgatccagcgatcgttaatcctaagcgtgattgggtgttagttttggtagtgacaatcactttagcattgatggtggctgcagtagggaagcactcactctcgctggttgtgtcaatggtaatttcgtggctgatcttttatttgattatcatttgggatgtgcatttgaatggcgcccacattattttgctgtttggcttagctgatatcgtcttttcattctttagcttgctcattgtgcagggcttgaataaaaaaatgttggcgacttggttggcaacgctgctaggagtatttgtttcttttgccttgtgctacgtgatcatgaagttaacgggtgaatcggaaatgaaatatgagaccggtgactatgcaacgcaagatccacgaggcttgtttttagctcagactttgattggaattttaggtgcagtaatggatgaggcgaccgatattatttctagtttgtatgaattaattcaaactaaaaagaatattacgatgagacagttgattcatagtggtcgaacgatggggcaagaaattatgggaccgttgattaatgtcttggtcttaatttttattgctggtgcgctgccagaaactattttgtacttgcgtgataataatactttagcttcaacttttggctttactctgtcgctgggggcaacgcaaagtgtgatttcggcaatcggaattgttctgacggttatttttgcgacaggatgcagtttgttcttcttgaaaaaacgcgattggaagagtttgtttaaaaaagaaggtgagaataaatgagtacattatttgcattgatcgttgtcttagcgattttaatgacaatcgtcggtggtgaaactggaattcgtagtttttttagtgtgctaattaatacgattctattgatcttagtggcgatgctaatatcatggggaattaacattgcaattttgacgctgatttttattcccttaaagctagttacgattatctttttaggcactcatgactatacggtagcaaagaattcattttattcttccttcttagtgtgtttgattattagcctctttattttgggttgtcaatacctggctcaagctgcaggactaggaccagaggcaggagagttattggttggcttgtcgcagatgccgggcttgagttatccgatgattgccgtgacagtggcgattttctcaactttgggtgcaatcgcggaagccgcggtagcaatgagttcgggcttgctagaaatcaagaagcataaccctgctatcggtgaagaagagttgatggcttctggtacggctattggtaatgatgttttgggtacagcaatgaacacgattttatttgggatgttcggtagttttttatcattattcttatggtatttccgcttgcattacacgattggtgaagttttaaatgaaaagctttttgtaaatgaagcgttaattatcatgtattctttgattggggttatattaacagtgccactatcatcatttatgctatcaagaggaatgagcaagaaaggaccaaaacatgagagtagaaaatctgacgctgactaactttaataatcgtgaatatcaagttgatacatatgcgctagagcctaatcctgaattggttgagcaaaagcgtccgctagctattgtaataccaggtggtagctttaatcacttatccaaaagagaaggcgaacccgtagccttagcatttaacaatcaaggcttcaacagtgtggtgatggaatataacttagtgcaagatccaggtaaaatttaccctgatgcggggttagatgttctaagtactgtgaaatatttcagagaccacgctgatgagtatcagttagataaagataagattttaacagttggcttttctgctggcggtcatgtggtcagtgtagctaataacatggctttaaataaaaattatcagacaaagtatgattttgataagactgatgttttacctaataagacaatcttaggctatccgctgattgatattaaaaagattggttttccgattccagaagatcaaaaagtaaaaatgccagtagagaaggatattttagatagtgcattaggtgttacacgtgaaacgcccgatacatttattttccaggcatgggatgatccggtggttttgatcggtaattcgattgaatatattggtgctttgaataaaaataaggtgtcggcagaggttcatttatttaatcacggctatcacggcttttcactggctcgtcataatgtagaaactaagggccaagcgtggcaggataatccgcatgcagcgcactggttcaacttagcgatggaatggctaaagagtgagtggggcgagtgatgtgaagcataaaaagtctgataatcctaatgacaatatttaccgcaccatcatcaagaatagaaaaattgaccgaatgattatgccttttgaagcggtgtactgcgtgtggctaatcattacgctggttcttaacttcaagctatttgcatattcgattgacgcacaattcgtgctaatttctctattttttattagtggatgggtttcgtcattaattaagaagcatcgcatgaagaaaagtggaaaataagataagtaaaaagagttctcgcacgagaactcttttttattagaatcatttactttttatctctaaagaaaataacttccttagcagctacaaatggtccagatgacttataaacctttaatctaatagccttggcatcgacatttcttaaaccaacaaccttattcttactgtcagatttccaagttaagtgatcaccatatggcttaaagttaacaccatcatttgaaagctcaacgttaacttcaacaggatcgccttggtgatcaatctttctaggtacccagaccattcgactcaagtgttccaaatgattaaaagtgaaggttaattcaagtggcttgtcttcgctgaccccatcaatggtttcccattcacttgctaacttcaaatcagtcaagtaatcaattggatgatccttaggactagctagactgctcgtgacatgaatgtcattaattgcatagttcattggatcgggcttggtaattgcgccaaacggatctgaccattctgaaactttgttgccagctacataacgcaaacgcagggtgtagcgggtatttggcactagttcatggaaagtaaatgaattaccatcaatgccatcatgtaaaatgccgttaacttcgatttgaacttggtcggttaattgcggccaaactactgttaatgaatgagagctaatcttgtctggatcaaccattggttgttttggtgaacgcaacagtgaatccgtaatagcgtgaaccaaagtttcattgccatatctgaagtttctgatcgtaatctcaattttagaatcggtaatatcgcgtttagctaacttaatttgtaaagcagtttgtttcttttcttggtattgatcaaattcaggcatccagctgtaatttgtgttaaagaagaagccttccttagcatgggcgaaggtatcaacggtaccgtactcctgcatcgggatttccttgtcgttgattttaacagtcaaaccatcaggataaccgtcacacatgatgttcaagttggtggtgttttccgtttggaaagtattgaaatcgccttgagttgggtcgatggtgatcgtcaatttgcttgcttctaaatcactcgtgatttgtgtagctacatggtttcttgaatagtcgttatagccgttatcatcgtaagtaaccattttactcttgccttgagggtagaggacatagttgcgttcgccgaggtcaaaaatagcgccgcctcgtacaaatactggtaaatgccaggatgggtaagactgcttattataaacgcgtccgcccaagtactttttgccatcaaataagtcaacccacattgttctgtggttaggcaagtaaaggttgtcttttcttgaattgccattaccatcttcgcgaccgttaacaattggcgaaatcaacaagttaggccctaacataaattcatggcccacctgtggggtgtagttgacttgttcatgtggaaattccaagaataatggccgcaagattggctcaccgacttgagcgcggtagattagggtatataagtaagtctgcaattgctcacgtagttttaaataggctcgattaatttgcgtcatcttactattgtaagcaaatggggtcttactaaatttaccttgatcgtctaagttgaacaggattggggtaaatgccttccattcaaaatcacgaatggcaatttgagcattaccaccgccagcggtaccgtcaacggcactaccaactaaaggctggcccgaaaggctagcccccaaaaagccagcaacttgtgttggaatgttttcccagttgccgccaatgtcaccaaaggctagcattgttctattttgactaccagcaataccagtattagagaaaatcaacggccgcttacgcttcaaattgttgcgtaaaattagcgcatcatttttcaatacttttggatcggttgtgtccgtttgaataaaggtggtatcaggtgaagccttcggtgtgttgttttgactccaaagaccagcgctaacgtcatgtatagcggcgtattcactgaagctagccatggcttcttcgttgatttcttgcacatcatagttaggcacgatccaacttaatttaaaatgctgcttctggtagcgatcaaccattgcccgtgctgagaattgatattcttcttcgccattcaaagagcccttgccactagcatcttctggcttgttagttctggtgtaataattaccgtcttcaaacataacagcattacgttccttagctttaccaggctgccataaggtagttaaaaagttgccaacatgacctaatcctagtgcatatttaggtggcatcagcggcttacccgttaacatgtaatactttgccaaaatatttttgggtgaattacctaatagataaaaggtatcaaacatgttggtgtcgtgctttaagatagtggcatccggattgcttttaccaaagtcataattgccagcactctcagtattgcgcaattcaccaaagccggagttagcccagaagaatggcacttgggtcaaaacgccgcctttaccggtaatcttgtcgcgcttgattgaaatgatttcacctttatgactgaagtagccgttctgcatcccgccaccaaagtaaaattcattcttgtgttgcttcaaaatttcggtagtttgatcattgcctaattcaagtggactcagctgaaccaaacgattgcggtgcagcgtctcgtcaaagatgctcattacggctggcttttgttggaaaataagttgataattgccagacttaatgattaaggaatcgctggttgccttaggctgtgatttttcaaaatagtcattgttgaattgagacaggtcaacaaaagatgagtgattctcgtcaaacttcttagctggatcgagaaaatatctgaagatcccgtcagctaaaatataaagacgagcaatatcgccggtggagtagtgaagttcataataatgatcacgtttgttggcaccgataagttggcctagttgatgtctttctatctggttttgtgtcatatttattcttcctatttaaacttgctaccttatattataactaaaaatcaaaaaacttcttaagcaattgtactaaaactggtatttaccaattttgttagatataattaaattaacaattacgatttagacatgtaaagaaagaagatatttatgacttattacattcatgcagataaatttttcttagaaaacagaacagaaaacggcggctatcttgaagttcaagataatggcaagtttggctttttctatccagaaagcaaaaagccagaaggtaagattgtcgattatgctggcaaatgggttgcaccaggattagttgacacccacatccacggctcattgcgtgaggatgtaatgaagagtgactgggaaggcatcaataagatctctaagggcttgcttagtgctggggttacttcatggatgccaacaacgatcactgccgcaagcgataccttaactagaatctgtaagatgtttgcggaccatcaaggtcaagaagaaggtgcaaagattcaagggattcactttgaaggaccattcttcacggaagaacatgctggagctgaaaatcctaagtacatgacggatcccgatattaatgaatttaacaagtggctggacgcttctaatgggatgctgaagaagatttcaatggctcctgaaagaaaaggttccaaagaatttattcgtgaagctgttaaagaaggcatagtagttgttttgggtcactcaagcgctagttttgaagaagcggtcgcaggcgttgaagcaggtgcaaccatgtttactcatacctttaacgggatgcctgatccaagccaccacacgccatcaatttctaatgcggcaatgacgcttaataatgtgaccgatgaattaatctgtgatggccaccatgtgcaaccatgtatggctaagactttgattaatgccgttggtccagaacacattgccttgatcactgattgtatggaagctggcatgatgccagatggcgactacatgttgggtgaattgccagtctatgtaaaagatggcatggctcgtcttaaggacggcgacaatttggctggatctatcttgcaattgaagcaagcagttaagaacgtggttgactggaacatcgttgctccagaaaaggcagtgatgatggccagctatgttcctgctaagagtgcccatatcttggacaattgcggtacaatcgcaccagataaggatgccgacttcttgattttgaacccagatttaaccttaagtgaaacttacttgaatggtgaatcacgttataaggcttaatttgttagtctagttttaaatagtcctcattagattgagggctattttttgaccctaaattttggcaaatagtatacaattaataatagtaaagtaggtattatacattaggagaaatttattatgccagatggaatcagtcaattactagtactttttatgtaataactttcaattaattgaataatttgtactcttattgattaaagaaaagtatcacatatgtttcatgaatctcgtctagccaagtaggtgagattttttattatgtttctatgtaatcgctttcaatttagaaaaaatatgctatattatgagtgtaaagaaattaagaaataaaaatattaaataagtttaagtaaaaggagacaggtgagttccgatgggcacttgagagtagaaagtcagatatatagaaaggtttgtgataccaatgggcatcgtaaattgaaaacaaaatgtagttcaataatcatcaagtgatattaatgtacataagaggccgtgaaattattagtaggcatagaataataactagttgatgaatcacttggattaggattaagaaagactttcatacatgataaatattaataagaaatgacctttcgctgaaatgaagtatgcgaagggtcatttaattttggcttaaattttttatccgatgtaatcacatctgtttactacattacgatgtactatattgcaatgtagtaaattacgatttagtaagttataatttagtaaagtataatttagaagatggcgaccaaatgtttattggacgaaagaaagaacttacaaaattagagaaaatgtatcaagctgataaatttcaatttgcagcgatctatggtcgtagacaaattggaaaaacagcattaattaacgaatttgttagaaataagccaactatttactttaccgggctagaagaaaatgaattctataatcttgaacgcttttcttctgcaatcgaacattttaaagatccagatagtctgagcagtgtaaactatggtaattttgaaaattgttttcgagaaattgctcgattggctcaaaaagaaagaatagtattagttattgatgaatatccatacttagctaatgcagtccatgcaattagttcaatgctacagtcttatattgatcatgaatttaaacaaacaaatttatttctgattctatgtggttcttcaatgtcatttatggaagagcaggttttgtcttataagagtcctttgtatggcagaagaactgctcagtttaaattacagccatttacgttacatgagacacaagaatatttcccacacatggataaagaagaggcctttattctaaatacgattactggtggcgttccattatatttgtcatatatgtcagaagacaaagatgtttgggaaaatattgaagaaaactttatggacgtaaacgcgccactttttcaagaacctaataatttattgaagcaagaattgcgtgatccagccaattataattcaattattaatgcaattgcaggcggggcatctaggattaatgatattgcaactaaggctcatttatcgacgccgttggttactagcaacgttactaatttaattgagttaggcattattgagcgcaaagtgccggtaactgatcaggctaagcctaaatcacgtaaaacaatctatcaaattgcagatggcttgtttagattctggtatacatatttgggtaaatatatgagttccattgatcgaggacaaacttcattggtaatgaaagtaatcaaacaagatttacacaatttcatgggaccggaattcgaaaaattggctcaaaattacatgtgggatcatgatgaggatgatgaagttatccctatgccgtttatttatctaggtaattggtggggcaatgatccgcaagagaaaaagcaagtcgaattagatgtagtggggctgactgcagataatctagttggatatttcggtgaatgtaagtggaaaaacgagcctatacctagaagtgtcttggaaaaattaattaatttgagtaatttgattagcgtggctaaaaggcattactatttgttttcaaagtcaggctttacggattcatgtacggagctggcagaacaagtggggtgcaagttgattagttttgatgaaatgtaatatcatttttcctattatttttatctgttgtgatcggagtaagtactggtgtttaaaaaaggcgataatgtggtgttaattctaaagcctaatggcaatcttgaaatgaaaaaagaaaaaactaattttggggacgaagtatcaaaaatgtctgctaaagaaaaaagattgcagattgaagatttgggatatgatccattagaacaaagatcaaaaggtagagaaagaattgaggattaaaagttagaaaaggttcttggaatcttttttgatgaatttaggtaatctaaacaaagaaacggcaccgctagataattagcgatgccgttttagttaggtttagcaataatcaactaagacataataaacatactaacctagcttaggtagctatattattatgcctgcttaatttttttaataaactgcgccgtcgtagaagttgtaacgagggcggttgaagtcgaagtcttttaattcactgatcttaattgcgttatcgcaaacaccccagctcattaagttgattggcttaccataatcttcatcaggaattaccaacaagatgtacttgccttttgaaagggcatagccaagttccattcccagaccaacatcttcttcttcaggcaagtaaacgccaagcatgatgtcgctggacttaatccctactaagtcgttatggtaggtagctgatgcccattcaatgtcgtgcaagtattcaggatgttcatcaacgcggatacccttatattgattatcaagtggtacatagctgttttctaagtcaacggtaggattttgctttagagcttccattgcttctttgtaagccttattttgcttttcgttgaaccaaccggcaccaaagtataaagtttttgtctttgccatattttttctccctttaaaaatgatttaccttaactttaccatcttttgggttgaaaaaaacgtcttgttaacttatggtgaaaatgttaattccacattaggaaggaaaaatccaatgactaatcaaaatctttttgcaccggatgcagtatttatttctaatcaaactaagcaagatttggtttttaaagaagtttacgagcatttacgcgaaagtggctatgttaagggaaactttttacaccatattgtcgaaagagagcataattttccaacgggattggatactgcaacactaggtaaaaatattcctaatattgcgattccgcacaccgagggcgagtttgttaacacgagactgattgttccggttgcgctgaaaacgccagtcacttttcataatatgattaatcctagccaagcaattgaagttaaatttttattcatgcttttagataatgacccagatgggcaagctgcattattagctcaagtgatggattttttggctaatacgccagccaacgaattgcgcgaagtttttaattttactgatcctagcgcgatttatgcctttttagagcaaaaatttagcaagaaaaaagaagactagtttttagccttttttgaaactaagtacgttataatatttttaggacaaagaagaacatagacgtgcatgtagcaggatagctacctgctcaagataggcgcgcgtgtgggctctggcaacagagctcttttttatgcctttttagagcaaaaattcggtaagaaaaaagaagactagtttttagccttctttttctaatcttcaagataaatattacgcaacttcatgatgtctgcacttgagagcttcattacatcgcgtaggtagttattaataccgccatattcatcgtttagtactttaacagcatggtcaaggtattcactgcggacactctgaatgtcacgaatcgattgcagcacattttcatttttaccattttgacgggcatgttcaatcatactgtcgacgaaatccttggtagtgatgttggttaaaagatagtctttcttaatcgtatttagtggtacgccaagagcagataatgcaagtaatgcaccgaagccggttctatccttgcctgcagtacagtggaaaataacactttcgccatccaccgtattttcaagcaagacatcgaaaaacttgcgatatgccttttgtgcaggttcactttcgatcatgtcttcgtaagcataatgcatgtgattgaagccaaaatcagcgtcgtcgtgtgcttgtgtatctaagtcagtgatactcttggatgaattggttaagtcctcactgaagacgggatcatagatatattcaacaccatctggcacgcgatcgggttgattatcaacttcttctttacttctgaagtccacgtcatatttaacgccgtaatcagttaaaaactgcttatcaaatggtgaaagatcagctaagttaccggttctgagcaacttgtgcatcttgatttttttaccggataaagtttcataacctccaagttcacggaagttgcgtccactagttacgccgattaattgattagttaattttttagtcaaaaaaattctcccctttctgttaatgaatgtcatgaatattattttagcaacaaatcttcaagcaaacaatcaattaaaaagtaacggctttcaaaattatgctaaaataaagagtaagtactagtgcaatttataggagatgaattaacgtgacagataaaagaaaagaaagcattttagttccagttgatggctcagaatcagctgaaagagcctttgacaaggctgtaaaagttggtttgcgtgatggtgctcatgttgatgtattgaacgtaatcgatacgcgtcaatttatgggtgaaatgcaagacactttgatttcaggagataccatttaccaaatgactcaagattctgaagaatacttgaagagtttgaagaaatgggctcacgataacttcggttttgacgatgttgattatcacattcgttatggcagtcctaagcggattatttcttacgacttcattaaggaccaccataacaatttgatcgtaatgggtgcaactggtttgaatgccgttgaaagaatgcttatgggttcagttactgaatatgttaaccaacatgcgttggctgatgttttgattgttaagacagatatggctaacaacccagtaaaaccaacgatgaagaagaactaattcctataagaatggacgttagatgtgaatatactcatttaacgtttttttttataaaaattagtcaaaaagcttgatagaatacgaatgcttttggtatcattttataaaatgaacgtggaatgactgaaggagagtgggataaattgcttgcacaagctaaaagaattgaaaacgtttttcttactgtggcaaagtcttcctcccgtgaagatgttttttctgttcgtttatttgataataacgttcttaaaaaggcttaattattggtcgtctttgagcgactcgtaattaagccttttttagcgtcaagtttgtttttgtttattttgtgttttatggaggaatcaatgaaaagatttcgtaaaatcttggtagccgttgtggcaatacttgttgcagttgttgcaactgcatgttcaagtaagagcagtagttcaaaggaaaactacactcctaagtcattaactattcaatttgtaccaagtcaagctgcaactaagttgcaagctcgtgctaagcctcttgaaaagatgctttcaaagagattaggtattcctgttcacgtttcaatgtcaactgactacaacactgttgtagaagctatgaagtcaaagaaggttgatgttggttttcttccaccagatggttatgtattggctcacaagcaaggcgctgctgatttgcttttgcaagctgaacgttggggcgttaaacaaccaggcggtaaggcaactaaggatttagttaagaactatcgtgccgaaatccttgttaagaagggttcaaagattaagtcatggaaggacttgaagggtaagtcaatctcagttcaaaacccaacttcatctgcaggttacgttttcccagttgctgaacttaaggaaaagggcttggatgtaaccaaggactctaagttagttactgtaactggtcatgaccaagctgttttgaacgtattgaacggtgacaccgatgcagcatttgtctttgaagatgcacgtaacactgttttgaaggacaacccaaagattatgagtcaagttgttccaatttacttcactaagccaattccaaacgatactatttcagtaattccaagcatgtctaagtcattccgcaagaagcttgctaaggcatttatcgctgttggtaagtctaaggaaggccgtaaggttattgaaagtgtctacagccacgaatgctatgattacgctaaggacagtgacttcaacattgttcgtaagtatgacaagatggttgaatccactaagaaataataattcaaattaagggagctgcgattaaatggcagataagccaatgatccaattaaaagatgtttctaagatctatgacaatgggactgtcggtttaaaggacatcaatttaacaattaataagggcgaattcgttgtagtagttggtctatcaggtgcaggtaaatcaactctgcttcgctccatcaatcgtttacacaatatcagttcgggcgatattttgattgacggcaagtcaattactcaggcaaaaggtaagaacttgcgtaacttgcgccgtgatatcggaatgattttccagagctttaacttagttaagcgttccagcgttttacgtaatgtattagttggccgcgttgcttattacccaacttggaagaccacgtttaatttatttagcaaagaagataaacaaaaggcctatgaggcattgcaaaaagttgacttggctgacaaggtttatgctcgtgccgatgagttatctggtggtcaacaacaacgtgttgcgattgctcgtgttttgatgcaaaatcctaaaattattttggccgatgaaccaactgcatcacttgatccacaaacatcagtcagagtcatgaatgacttaaagatgttgaacgaaaaatacggcatgactgttgttgccaacttgcacagtatcgaattggctcaacaatttggtgaacgtgtaattggtattcgcgctggtcaagttgtttatgatggtaagatgaaggatactcctaagtctgtcttcactgatatttataatggtggcgacggcagcgaggaggcagaataatgcctaaaacaaaagatgcaatgaatttggtttggaccatcatcatggtcgctggcttgttcatttcaattgatgtaaccaatacgcacatttctgttttattccaaaactgggatcaatttgcggatatttttgtgcaaatgtctcacccagattggggctatatgagtgttatttggcctaagttgattgaaacgattaaaatggctgttttgggaaccgtcattgggtcagtaatcgcatttatttattcattattaattgcacgtaatattgttaaaaacaaggcagtgactggtgtgcttcgttttatcatgaacatcatcagaactattcctgacttgcttttgggtgcgattttcgtagctattgttggtatcggtcctgttgccggtgtcatggctttggcagttttcacctttggtgtggttgttaagctattctacgaagcaattgaaactattgatccaggtccaattgaagctttaactgcagtaggtgctaataaattacaaattattcaccaagcagttttgccacaaatcatgacttacttcatttcatatgttttatatgcattcgaaatcaatgtcagagcatcaacagtccttggttatatcggtgccggtggtattggtttgaacttgcaacagactttgcaggtcttcaactatgctcaaactggtacgatcatcatcgttattatcgtagttgttgtcttaatcgactatgtttcatctaagtcacgggaggcgttaatgagataatggatactactatgaaaaaattacctgctaaacccgttgaccgtaagaagcaagtagtgcattggctgattgcgattgtgacaatcatcattattgtttggtcattcactggcattaactttggtgggatcaaggcaactgctggccagattgcaggagcgattttctcagggattttccatccggattggaaatacgtttacaatggctctggtgaagatctgatctcgcaattatggcaaactatttgtatcgcattcttaggtacatttatttctgcaattatttcattgccatttgccttttgggcagcacacactaagcataagcactggtacacttcaagaattggtaaaattgttttggcaattatccgttctttcccagaaattgttttagccttgatgttcattaaagctgtgggtccaggctctgcagccggtgttttggcattgggtttccactcggtggggatgcttgccaagctgttttcagaggcaattgaaaacttggatgacggaccaaatgaagctgttgttgcagccggtggttctaagtttcatgtggtcatgttctcaactttgcctaacttgatgccagcacttatttcaaatacgctttatcgttttgatgtttccattcgttccgcatctatccttggtttggtaggtgccggtggtatcggttatccattgattattgctttgcaatatcgtcaatgggaccgtgttggtatcattttgctagggatcatcattatggtggtgatcatcgactggatttctggttggatcagaaagaagttagtctaattcccaaaatttgaatattaaagaaagcgaagacgaaaagtccccgcttttttgttagccgtgaaatttaaattggcattgattaagatgatcattaattaatccgattccctgcaagtaggaataaatgactacaggtcccacaaaggaaaaaccatcttttttcatttgtttggatatcttctgcgataggtcattagaagcgggaacgtcatcaaagctggcaatatcatgcacaattggagtaggtacaaaattttgtaaatatttggcgactgaacaatatttttgttcaattgccaaaaatgcccgagcatttttaacagcagcattaattttcattcgattacggataatgcccttgttttgcattaatgactcgatatctttatcggtcatctttgcgacttcagagatctgccaatttttgaatgcagctttaaaattgtcgcgtttatgcaaaactgtggaccagcttaaacctgattggaaaagttcgagcacaagcatttcatacaaatgtgactcatctagattaagtttgcaccattcatgatcgtgatactcctgtactgcttcgtcttttgtatcgccccatggacagcgaataatttcttgattcatatttttctctctttctatgtaagtaatgttttacccctctattatttattacgcaaaaaaatgcgattattttttgagaaattatatttttatgtgcgaaataagggttttaacagctttttttgctataattaggtgtgaatttcgaggaggatcctatggaaaaattagataccatgatgttggctgatgatttagccttatcacaagataaaattttaaatggcgaacaagactttggcgctgaagctgtttacaaagtaatcgataacttgggcgttttaaataacccaatcaaggattacttcgacatgactgaagaacaatattatgaagctgaaagcgatcacaaactaactttgatcaagatggacagtaagttgactgatttgcatgatcgcattttaactaaccatgttgatggttttgttgataaggacgagatcaacttgacctacaatcatgagaatccatatgaagatgatttatacgatccaactactgattatcgtgaaattgtttacagcttgaaagttattggtgcggttcaagcaattgcagctaaggacttgcaagaagtattgtctaaagatgctgtattatcaattggacttgccgcatatgctttagcacacaacgcataaattatttgagtcggctggtaagcggccggctttttttgcttttttgaggcgaaaagatgaatttgtttaaacacataaagggaatagttgatcgaatcgttggcgccaaaaaacgctctgcaatggataaagatagtgaattgcttgatccgatgcaaaaatatactactgttggagaatatcatgttggtgccgttgatggtacgccgcatggtaaggactatgttttaaccgtttatcaagacgaagacggcgttttgcgacaagcacttagtccagagagtacaacgaaattagcaccggaatatttacgcaagtataatgcggaactaggtcattttcgtgcctttcataataagaagacagggcgccgttattgggtggaaaattacttggataatttcactacggaagtgaaaaagcatattcgcccaggcactaattcggtcaatatcggtgtaattacagatactcactttaaagataaagatagcagcgatttttatggctttaatgggctgcaacatgtgcaagaattttcttatttagatcaatctggcttgctagatttaaaagtccacttaggtgactggatcgatggctccgatgctggcctggtcagtgaaagtgaattggtcaagctgaacaagtcttttaagtcggatcaggtgccatatttgagtatcaagggtaatcatgatgaaaatgataagtttgatgaacatcatgatttaaaagcctcatttccagaaaatgaattcgaaaatattatgtggcccgatatgtaccggcaacgaggaattcattatgtttcgcgccagcacggggtggcatactttgatttagatgacgtgcgggtgatttcagttaatacgtcagatgttccatatgaattaaataaccgcgggcaaaagcgctatgacaataagattgtattggctgtgcgtgaagatcaaattgaggaaattatcgaaattttggctaattcttccaacaaaaagatcatcttcatgtcccatgccaacccaattaatcgaaaggggtctaatgcacttaagtataatggccgctctttgcatgaactgctagttgcctttaatcaacgtgaaaaaggtcgaatgcacgctagcaatggtgttccaacagaatttcgtttatcaaatgattttgattttaccaatatcaagaatgcgagaattattgcctacttctgcggacatcggcatcgtgaagaccagtatcggatcaacgggattcaatatattttgtttaactgttctgccttgatggggccaaatcattcgctaacaactaaatacaacaaaaacttagaccgaagaattgatcaaaataatgaatttgcgggttatattgtgaacgtcgatttaaaacgacaccgcattcaatcctttggctatggtgcagcttctagacgccgggtgtatttcatttagttaaggaatagtaaaggtatttggctattacaagtgtttagcttataataaaaaggttaaagtaaaaaatagtgaatattatagcaaatattaagatttagagaattgacttaggggaatttaaattatgtgcggaattgtcgcgttttatgatccaaagataaatgaaaagcaggctgtcattggcaaaatgatggccacgattaaacaccgcggacctagttccgacgggtattatactaatgacgaggttgcccttggttttagaagattatcaattattgatcttcgtgggggtagccaacctatttataatgaagataaaactagagcaattatttttaatggtgaaatttataactttaagccattaagagaagaattaattaaagcaggccatgattttactactaaggctgatacagaagtcttacttcatggttatgaagaatggggcatggatggcttgcttaagcgtgtacgtgggatgttcgccttcttaatttgggatgacaacaacaagaccctttatggtgcacgtgacttctttggcattaagccaatgtactacagtaatcaaaatggccatttgttggttggttcagaattaaagagctttttggaatttccaaagttcaagcgggaattaaatgttgaagcagttaagccatacttgatgaatcaatacaatgacctagaagaaaccttctttaagggcgtttaccgcttcccagcgggccattggtttgaatacaaagatggtgaaatgaagacccatcaatattgggatgctgaatataaagaaaatagcctttcctttgaagaaactttgcaaaagatcaacgaagatttgaaagaaacggttgatttgtatagaaacgctgatgttaaggttggtgctttcttatcagaaggaatcgactcttcatacttgactagtttgcttaacccagatgacgttttctcagtaagttttgatgattcaacttatgatgaagcttctaaggctaaggcattagcagatattaatcactggaagttcttcagcgataaggttgatgctgatgaagcaatgcgtgacttcccagaaatgcaataccacatggatgaaccagatgctaatccgtcaatcattccactctggtacttgtgtaaactagctcgtaagcatgttactgttgctctttcaggtgaaggcgctgatgaattgtttgctggttatgtgaactacgggatgcatacgcataacgacattattaaggtctttacttcagaattgaaaaagttgcctgagaagaagcgggttaaattggcacacaagattaagagaatgcctaatttcccaggtaaagttcacatgtacaccaatttagctgaaccgagtgaattttatgtcggtcaatcggttatctatgacatggattacccaactatctttacttctaaagatgctaatagcattttacagccaacgtatcgcaataaattgactgttaacggcatttaccaaaaagactttaagaaagtaaagggagtcgataatgttaagcagatgcaatacattgacttgcaccactttatgcttaacgatattgaacaaaaagctgataagatttcgatggcccattcacttgaagttcgtgttccttacctcgacaagaagattgcggaattggctaactctatcccaaccaagtacttggttaaccgtcatgataccaagtatgctttgcgtaaggcttcagaaaaagttttaccagatgagtgggctaagagacctaagcttggcttcccaactccaattaagcaatggttgaaggaaccacgtttttacaaacaagttcatgctctttttgaagaagaatttgtcaacgatatttttgaccaaaagaagattatcaagttacttgacgacaactatgaaggtgatggctcacatagacgtcaaatctgggctatctataccttccttgtttggtacaagttgttctttgttgattacgaaaacacagttaagaaatatcaacacgtgcaacctgaagttgctaagctaatttcacagggtaaattactataattctagggagattttttgaggatgagtaaaaaatttacgccgatcttactcggtagtgatatcaacgtgtatggtatggcacgttcatttaatgaagcatatggcattaaagtgaaggccttagctgacgttcaacttgctgctactcgttattcaagcattgtggacgttgaattgcatcatggctttagtagcgatcctacttttatggacgtgatgcacaaaaagatggaagaatacaagaatcacgaggagccagttatcttgattgcttgtggtgatggctatgctgagttgctttctaagcaccaagatgaattgaaaaaggtctttatcgttccttacataaaatatgacttacttgaaaaattaatctctaaggaaggcttttatgaaattgcggaagaatatggcttgccttatcctaagactaagatcattacgatggatgactacaagtcaggtaagtacgaggatgtcccatttgatttcccagtggaattaaagccggaagatccagtttcatggttgaagtgtcaatttgaaggtcggaagaagacttttgccattcaagataaggctgaatttaaggatatcgtaactaagatttatactcatggctacaacgctgaccttattttgcaagactttattcctggtgatgattctaacatgcggaccttgaatgcttatgttgataagaaccaccaagtaaaaatgatgtgtttagggcacccattattggaagacccaaccccacaatcaattggtaattacatggcgattttgcctgagtacaatgaaaaattgtacgaagaagtacaacaattccttgaaaagttgaactacactggtatggccaactttgatatcaaatatgatccacgtgatggtgaattcaagttcttcgaaatcaacttacgtcagggacgttctagcttctacgtaactttgaacggttacaacttggctaaatggtacattgatgactatgttgaagatgccttgaaagataaggaaacagtttatggtaataagcttgaatctaaatacaagctttggttaggcgtgcctaagaagatattcaataattatgcttatgacaacgactataagacgactgctgacgaacttattcgtgagggccgctatggtactactgtcttttatgacaaggatagaaacttcaagcgctggttattgatgaagtacatgttccataactacttcaaacgttacaagacttactatgaagttaataagggtaagatctttgacgaagaaaataaaaaattaaacaaatagtttaaattgagaggtaaaaaatgcctctctttttttctaaaaaattttagctgaatcatttcccaatttaatggtcttttggttaatacaagatatattcatctatatttgaacacaatacaagatgttgtgttttatgctatgataaagacacgagatttggagtgattgaaatgctaaaagaagaatttaaccaacaaaatgtaacaaaatttaatacgcctaaaacttttgttaaacgtgatgggtcaaagtatccgttcgcaatttttaaactcaacatggttttgcataacctagatttagataatgtagcacctgctgtaattgaaaaaattgtggctaaactagatgctgctgatgaagtaaatgcacaagatgtagcagttgcttttagagatagcctaaatgagttgggttatttggatgaagctaaagcttatgtgcaataccgcaagcacgatgaagaggaatggattaaacaaaccgatactcgtgcacggttaaagcgaatggttaatggtgacccaacgattgttaacgagaatgccaacaaagatagtgaggtcttcagtactcaacgtgatttaactgccgggaccgttggtaaaacagttggtttgaccatgatgcctgagcacattgctaaagcccacttgcgcggtgatattcactggcatgacttggattacacaccactttcaccaatgactaactgctgtttgattgactttaaggatatgctaactaatggcttcaagattggaaatgcctatatgactagtcctaactcaatcaatgtggctacacatcaagttacgcaaattattactaatgtagcttctagtcaatatggtggctgttcttttgatcgagctgatgaagtgttagctccttttgcagagaaaaactaccaaaagcatttaaaggatgctggcaagttcattgatgatcctgaaaagctggaagaatatgctaagagtcaaactaagaaggacatttacgatgccatgcaaggcttggaatatgagattaataccatgttctctagccaagggcaaacgccatttactactttaggttttggtttaggtacttcttggattgaaaaagaaattcaaaaagatatcttgcgtatcagaattaaaggattgggtagagaacgcagaaccgcaattttccctaaattagttttcaccattaagaagggcttgaacttacatccaggggaccctaactacgatgttaaacaactggctattcaatgttcaactaagcggatgtatccagacgttttaatgtatgatacgatcaagaaaattacaggttctttcaaggttccaatgggctgtcgttcattcttacaaggctggaaggatgaaaatggtaaggaagttaactcgggcagaatgaacttgggtgttgtaactgttaacttgccaagaattgccatggagagtcatggcgataagaagttattctgggaaatcttcaatactagaatgcggacttgccaccaagctttagcctttaagggtagacgtgcaattcaagctaagcccgaaaatgcgccaattatgtatcaatatggcgtctttggtaaacgacttaagccaggtgatgatgttaacgagcttttcaaaaatggtcgagctacgatttcgttaggctacatcggtttgtacgaagtagggacagtcttttatggccctgattgggaacacaatgaagaagcacatgattttacaattgagatcgtgaagaaaatgcatgacttgtgtgctaagtgggaaaaagaggacccatatcattggcattacagtttgtactcaactcctagtgaaagtctaactgatcgcttctgccggctcgatacggcaaagtttggcaaggtgaaggacatcactgataaggaatactacactaattcgttccactatgatgttcgtaagcacccaaccccatttgaaaagttgacttttgaagcaccatatccatattatgctgcaggtggttttatccattattgtgagtaccctaacttgaagcaaaatccagcagcccttgaggcagtttgggattgggcttatgacaaggtaggctatctaggaactaatacgccaattgataaatgttataagtgcggttttgctggtgaattcaagtctactgccaagggttttgaatgtcctaagtgtggtaatcatgatcctgctacttgtgattgtgtcaagcgaacttgtggctacttgggcaacccattgaagcggccaatggttcacggtcgtcatgaagaaatcgtgcaccgggttaagcatatggactttggcatggaagatagtttagctaccgaagaagaagtaaaaaaaggtgagtactaatgcctgaaaaagataaaaacactcaagaaggaccagatatccggagtaatttgatcaaggttaatatgggtggggataccatgtttgtggatcctgaccaatataagccacagttagatcaccaacgtgagttaaaaagaatgcaccgcaagccgaaaaatccaaaaccacaagagtggaagactgaggattattctaaacataaaattgcggattataagccatttaactttgttgatggtgaaggcgttagatgtagtctttatgtttcaggctgtttgttcgattgccctggttgctataatttagcagcccaaaactttaattatggttttccatatacgcaagaattggaagaccgcattattaaagacttgggccagccatacgtgcagggattaaccttactaggcggagagccattcttgaatacttgggtttgtttaagaattattaaccgaattcgaaaagaatttggccacagtaaggacatctggtcctggtctggatatacttgggatgaattgcaaaaagaaacacctgataaaaaggaaatgttgtctaagatagatattctagttgatggccgctttatgaatgatttaaaggatttaaccctgcaattcagaggttctagtaaccaacgaattattgatgtgccaaagtcaatgaaggcaggcaaggttgtcatctgggataaattgcaaaaataagataaactaaagtccggaatgattttctggacttttttgctaggtgaaaaaatggaagaaaaaaatattaaacaagttgatcaaatcatgacggccttgacccaagtgattgatccagaattacaagttgatgtagtaaatcttggtctgatttatggcatcgatatcgaaggagataaggcaaccattaagatgactttaacaattatgggttgccctttatctgattatttggaacaacatattcaaaaagctgttctttcagttgctggaattaagtcttgtgacattaagctggtctggtatcccgtctggacgacagagcgtctttctagtgcagctaaaaagcaattaggtgtaactaaccatgatgatcaaattaagcaggagaaagccaccaaagagaagattatcgacttttcagtaccgatcaagaaaatggcagatgaataccctgactttgttcaaattatgtacgattgtggttttactagaattaaaattcctggattgcttaaaacggtggggcgtgtgatgaccattccattgggagctcaggcaatgaaacttgatttggctaaagtgaaaaaagcatttgaagataaaggatacaaggtaatcaatgactgataaaaaaagacaggacgcaatcctgaaaattttgcattatattcaaaacggcggcgattttgcgaccgcaaagaagatgtttcaagaagaattcgatcaggttgatgtggccgaaattacagcggcagagcgcgaattaatcaagcaggggttaaacccagcagagattcaatacctgtgtaatgtgcatgccgatgtctttaagggtaatatcaaggagaatgcggtaaatcctgattttgctactccggggcacccggtgcatacgattaagctggaaaatatggtactgaaatcattggttaatgacgcactcttgccagatttgaaaaagtatcaagcaggtcaagatacactggataaaatcagaaaagaattgagtgatttggcaacaatcgataagcattaccgacgtaaggagacctcgctttttccattaatgaataaatatggcattacagctccgcccgaagtgatgtggggcgttgatgatgatattcgcgatttaattggggatgcaagcaagattgctggtgaggagcatccagataaagatcagttggctgaggcaattaaaaaggcgagtcatgaagtgcttgagatgatctttaaagaggagagcattatgattccgatgattgacgaggtagctgatcaagatgattggtacaacgttaaacgcgaagagagtcagattggctataccctgattcgcaagccaatgaattggaagccaaaggaagctaaaaaagaagcagggcctatttctgttagcaatctttcatccttcctcattaattttgaagaaggaaggttaaatttagagcagttaaatgcaattttggatatgttgccatttgcattgacctttattgatgaacacgataaggtagcttattttggcggcggtgctgagatttatccgcactcgcgcaatgctattggcaatgacgtattctcgtgtcatactgctaaaagtagaccgttaattaaaaagatttttgcgcaatttcattcaggtgaagttgacaagtatgagtttcactttactccacacaagatgaagcgctgcttatacctacgctattatgcagtacgtgataaaaatggaaagtatctgggttgtcttgaggtagcacaagatgtgacagaaattagaagctggactgaagaaaagaaaaaaatttaacttgttgggctgtgttctagtaagggatgcagcttttttctacccaaagtcaagtattatcaatgatttaagaaaataaatttacttgttttaatgatgcgaataaggttaaagcaaataagagtttaaatttaagaaaaagcgaaagtaccacaaataagcctatgaatacttgtagtttttccataggttgcttatacttaagttgattatttgatttcagctaaagtcttttatttttggtggctatgttgtaatcatataattgatcatgtttgataagagcaaacattgtgcgtatcagtttatggactgatgcaatggcgattttcttatagccttggctatttgaagatcgttttttcttgtcataataatcagttatatggcaaggctgcgtagcctttaccgtctccatttgaataataactcgataaagtatttttctggcaatatgattgccatgcttggtaatgccaagagaactgtctttttcaccagattggtaccttcctggatcaatgccaacaaacgcatcaatttgagctgaagtgctaaaccgtcttagatcaccgagctctgctactaatctcactgctgtaattctagcaacccctgggatactcaaatagatggataaagcacgagcgtttactgctttagccagcttttccatgtagttaattacatagtcgcgttcttgctggagtgaaaacaaattagaaatgttcctttgaatagctctaacgataatactatctttggaatcataaggataagcttctctagcaaaagcgtataatcttgtggttaagtaccgtgccctttgttgtcctattccagaaatagaattaagcatttgagttacctgtgtctcattcttttctagaacatatccagcatgtgggaaaagactaacaagcgcccaataaattctgccagatggatgagacagtatttcttcaatttgtgggaaagtggattggaggttgcggtgcaattgatttttagtagtaactatactcctagtaagttcttcataatagcgactggcattctgaagttcatgatactctctgggctgtggatcacgcaacttttgcggggcattaaattgaattaaagccaggcgataagcatctaccttatcagttttattatggcgtaaattattgtccattagctttttcgctttaagcggattaagcttcaaatacttaatatgataatcctctaagaaagcttgcaggcttagagaataaacaccagtagcttcgaaaacaactaaaggagttatcaaatattggttcagttgctcataaagtttttgatagccaaaggaatcattagagattctaaaagattcgccttgtttgatccggtcattaaccacacaaactgtggaagatttactgctaacatcaataccgaaaataatttgtgattccataatataacctccgctgtgaagataaacctctttatcaacctattaattctaattttctaaacacggcatctaagtgcccacagacttcgaagagacttaagaataggtggtaaagcagtccgtttcttttacgacatcaagtgtctaaaaagctgaagacttgatttgctttatcttcactttctattttagacaaaataaaaagtgccagatcgtgaatccgtcgattcatgatccaacactaggttagtatgtttcttttgccctcgtgcaaaaaatcacaattcttgctagactagattgagagaatgattaaaaagaagggaagagagaaaatgcgcacagcacatggaaaacaaccagctgatgaaatcaaattgcattggcttcttctaggccaattactaacgtggttgggttccagctttatttggccatttacttcagtttacctgcacgaccatcttggcgtttcactagctttagtgggtgtcgttttgctgttcaactgtgttgcaaatatgattgggtcatttatttcaggctggtgctatgaccatatggatccatatgtcttgctgattgtgggggctgctttagatgcggctgtcttgtttggcatggctttgaatcatagttggccgttatattggctctggatgactttaactggctttttgggtggctggaatggagcattgattaactcgattgctactagtattaaatctaagccaggtcgttatgtcttcaatatgatctactttgctcaaaatgttggggtcgtttgtgggacattagcagtaggttatctttatgattattcagtgactttattatttgtcattgctggtcttttattcgttggcgtttgcgttaacgcaattattaattatcggccaatgattcagttccacaaggagcgtttggctaacaaaggcgaatcaaagaagaaggcctttgagccgatgccaaaatacaatctgattatgtcaattggcttttttgttacgatcgctgtaatttggttgatgtacatgaactgggaatcaaacttgtctgtctacatggtttctttgggcattccttttcatctgtatagtttgttatggaccatcaatgccggaattattgtcatcgtgcaagctatcttaagtcgttttactatctttaagagcttatttagacaaattttatttggcactttgatgtttgcaatttcttttgttactttgatttttgccaaagattttgcacatttcgccttatccatggttatcttaactttaggcgaagcaaccgcaatgccgtcgattccaacttatgtcaatgatctgtcgcccgattctagtaagggcaagtatcaaggcttaaccttgtctgcatcgtcaattggtcgagctctaggtccattatttggtggtttaatcattgaagatttcggctatattcaattctttgctgttgctgcaattggtatctttttgcttttagtcatgcttattccaatgcatgcgaaactacagaaaaaactaaaattatttgtaaaataaaaacaacctgaattgtcaaattaagtgcaacagttaggttatgaagagatatattgcttgaagagttcctctgctgtgtgatattggaggattcggcgatatttgtggttaatggcatcagttgcctgttgaacataagcttttgacttgtctttcatgctcttgcccttagggaagaattgacgcaaaagaccattgcagttctcattggtgcccctttcccatggagaatatgggtgagcaaagtaaatctggcagcccttgatcttggtcatatccgcaaactcagagccattgtcaaacgtgattgatttaaaccaggcaggatgtctgtcaatctccttttgaagcagcctttggcatgtgcttgcccgatagtcaggaatcttgataactacttcaaagcgtgtggttctttcagtcaaagtcattaaagcaggctgattcttgcgtctgacgcctttaaccagatctccttcccagtgcagcggagcttttctgtcttcaacctccttaggacgctgttcaatggaattgccaagatgcttcttgtgcaaagcgtgaccgccatggctgtgatgacgcttgttcctgcgtcttttgagcttcataggcagatcaatattgcttatgtccagcaagccctgatcaatatagcgatagacggttggtgtgctgggacaagggtagcctggcatagtccttttgaattcaccaacgaactcatcgatgctggtggcatcaaatttagctttaaagcgtctggagagcattctcaaaaagacagcataatgcttcaatggattgcgctgatagcagtttttgcgacgcttctcataataaatctgtgcagtatcagcgtaatagtgctcatacaataaatagctgctgtctctttgcaggacgcttccgcatttgatttcgcgactgattgtcgacttatggcagccaacttcttgagcgataacagtacgggaagttatgccggaatccagcattgcttgaatttgtccacgttgtacgctggttaattgatgatagtgcttagaaatgctagaatttgaattggtcatgaagatcttcctttcttgatttttcgtcacttcaagtttaggtcttcatggcctttttgtttaacacttagtgttgcacttcaattttaaatccgggaaaataaaaacaacatgatagcgttaatttttttataatgctatcatgtctttatatgaaaaatttttccactagggaggtaatttaatgtattttaacgtacgcggcggtgctggtgacattactaaggctaatacttcagcgcgtctacaagataatttatatttggccgttaactcagaatggttggaaaaggctaaaattccatctgatcgttcaagaaccagttcatttgatgggatcgatcttaatattgaaaagaacttgatgcaagactttgcagattttgctgctggtaagaaggaactgcctactgtgcctaacttcaagaaggcagttgagctttacaaggttgctaaaaactttgacaagcgaaatgcggatggtgccgcacctattcaggcagatttgcacgaaattttagacttgcgcaacttcgctgactttaacttgaaggcagcagatttttacaagaatggttttgccgttccatttgctttcagtgttgaagcagatatgaagaatactaagattcactcattgaattttggtggtccaagtactttcttgccagatacgactacttacaagactccagctgctgagaagttattggatgttttgaaaaagcaatctattaagttgttaacaatggccggacttgatgaaaaggacgcagaagattacgctgacttggcaattaagtatgacgctaagattgctaaggttgttaagtcaactgaagaatgggcagattacccagcaacttataatccagtttcattgactgactttgaagcaaaattcgattccttcaagatggattacttcttgggcggattatttaccaagaagccagaacggataatttcaactgaaccacgttacttagatcacgcggaagaattgttgaatgaagaaaactttgctgaaattaaggcttggatgctggttaagtttattaatggcgtagcttacagcttgtcacaagatttccgtgaagctgcctttccatttagtcaagctttgtcaggccaacctgagctttcaagtggcgttaagcaggcatatcatattactaatggtgacttcggcgaagtagtaggtgtctactatggtcaaacttactttggcgcagaagctaaagcagacgtgactgatatgattcacaagatgcttgatgtttatgaaaagagaattcgtgaaaattcatggctttctcaagcaactaaggataaggcaatcgttaagttgcgcgctttgatcttgaagatcggttatccagacaagattgaagaaatctatgaccgtttacaagttgatccaactgctagcctttatgaaaatgaagtgcaatttggtcgggaacaaattaagtacaatcttgagaaattgtaccaagatgttgaccgtacggtatggttgatgccaggtgatatggttaatgcatgttacgacccacaaagaaatgatttaactttcccagctgcaattttgcaaaaaccattctatgacttgaaacaaagtcgtgctactaattatggtggaatcggcgttgttattgcacacgaagtatcacatgcctttgacaataacggtgctcaattcgatgagtttggtaacatgaagaattggtggactgatgaagattttgctgaattcaagaagagaacgcaagctgaaatcgacttgtttgatggtattgaatatggccctgtaaccttgaacggtaagcaaatcgtatcagaaaacattgccgatcaaggtggtttgactgctgctgttgaagctaacaagggtgaaggtggcgacaagaaggcaatgcaagaattgtttgaaaactttgctcgtgtttggacaactaagcaattgccagaatcaattaagacgcaagtatctatcgacgttcacgcaccaggtccagaacgtgctaacgtgcaatcacaatgccaagaagaattctataaggcatttgatgtgaccgaaaacgatggcatgtggcttgctcctgaaaagagagtagtaatttggtaagtaacttttcttaatatcgagtatgaaaaattagctaaattacatataagctcctataacaagaatgactacagtgctgctactacactgcagccctttataacttattacccattaataaattttttgcactaaaaagtgtctgggaaaaaactaagtctcagatcatgaaaaaagaacgttgaatttttgtttcaacgctctttttgtatacttttagctccagccttgatattattaaatcatcacaaaataaaaaaggtggaaactaacatgtacaagaattatatcacaggtcaaactgctttaacacttaatctagattttgccattccggccaatcatttggctaatgtcatcagctggtttgtagattcaattccagaagatgttttagtaggcaagactgctaaaacgggccgcccagcctatcatccagccatgatgctcaaaatactgctttttgcttactccagaagagttttttctggcagaaagattgagttgatgctggaagaaaatctgccaatgatgatcttggctgaccagcaaaagatttcatatcatactatcaataattttagatcaagcagccatgccaatgaactgattaaaaagagctttatctacttcactaacctgttagaagatgaaggcttaatcaatgaaggtgctgcttttatcgatggtactaagattgaagctgatgctaaccgctatacatttgtctggcgcaaagcggttgaaaagtatcatgaaaagctgaaaggccaggcagttgaactttatgatgaattgattactaaagaagtagtcaaagaaatggaaaaagaaaaagttcaaactagtcaggggctaaaggaattagctcaagaaactgaagcagaaattaacaagctgactaaagagattgagcaggaaaacaaagccattcctggcggttcacctcgaaaagccaagcgacgtggactaaaaaagattctgcaccggctaagaaaagattatgtgccaagaatgcaaaaatatgaagaagccgaagagatctttgccggacgcaacagttattccaaaacagatcatgacgccacctttatgcatatgaaggaagaccacatgaaaaatggtcaattaaagcctggctacaatattcaagcagtcacgaccgatcaatatgtagttgattatgccatctttcctaatccgacagatttcaaaactttggagccggttttggatcaaatgaccgtgttggacaagtttgacaaaatcgtcgccgatgctggctatggcagtgaatacaattattcgatgctggaggaaaaatatccagacaagaagtactttattccctacactatgtatgaaaaagaacagaccaaaaagtataagaatgatccaactaagctaatcaactggtactacaatgaaaaagatgattattacattgatcatcatggcgtcagattcaatttcaaatattacagccagcgcaaggatcgttctactggtcaggtccgtgattttaaggtttatgaggcagacgagttccagctaacgccagaattggaacaattggctaaaacagctagcggccgccagcgccaagttcgctataatcctaactggcaatatttaaaagaaaaagcaaaagaagttctccaaagcgaagaaggcagacacatctatggcatgagaaaatatgatgtagagccagttttcggacatttgaagaacgtatttggcatgcgcagaacgcacctgcgaggtaaagagaaggtcgaaaccgatatcggaattgcctttatgatgatgaatttgaacaaatattgtcaaagaaggtggctgaagggccgatttttattgttaaaaattttaaagagaacaaaaaaacgatcaagattcttaaaaaaggaaatcttgatcgtttttattcatctggaagctagttttttcccagacactttttagtttagtaattatttagttttagctgtcgagtaatcctttggcttaatccgcttaatgtaagatggatttggtcgacccaggattaatggtacacgctcgattacggtatcggcgtattctaagccgaaccaggaagctgggttagaagacaagttttgcaagcgaacccgcgcttccacaagccatttttcatagccaaccaattgtgtttgtggactgatgacgtcgttaacaataacgaatgagaagtcacctacgtcacgacctgggctggtggtgtattcctgtggttgtggctcaatcgtaccgtcggcgatcaagtcatgaacgatctgacgaatgtagacattcacactagtttgcttcttaaagccgaggtagagctgaatgttaattacgttcttcgtaccgtaagtgttaacagcatattcagcggtaaatggctcgttagtaacattgacagtgacaaaccagtaagcctttgctcgtttaggtcttttatccaaaattgagtacaggatttcacgtttgatgaacttattgtacttaacgttggccatgtaaaccaagttggtagcataagttgggtaattttcatcgtgacttaagttcgttaacatgtcggtatattcatctaagcgaacgtaagcattgcgagcttcacgcttgtcacgaaccttgttgccgtaataccaaacatacattatgaagccgatagcaccagcgatgaagagtgaaacgtaaccaccatgagtaaatttagtcaaacttgaaatcataaacatgatgtcaaggacaccgaagaagatcaagaagatccagttccaaacagtgttgactttcttcattactaaccattcataaagcaggatggtagtcattaacattgaaattgtaatggacagaccataagctgcttccatgtgagctgaagtttggaaatataagacgattgcgatagtagcaacacagatacccttgttaatggaaggaatataaatttgtcctttttcgttagatgggtagttgatgttcattcttggcaagaacttcaagcctgaagcttctgcaactaaagtgaatgaaccggtaattagggcctgagaagcaataacagcagcaatagtagccaaaatgatggcaaacaatctgatgttagctgggatcatttcaaagaatggattgagcacaccgccgtctgcaggacggtaagttgggttgttcaaaatccaaacgccttgaccaaagtagttgagtgacaagcaaacaaaaacaaatggccaagaaccaataatattgcttttaccaacgtgaccaacgtctgaatataaggcttcggcaccagtcgtagctaggaaaattgaccctaaaataaaaattccagccttattatatggactgactaataatctaatagcgtaaattggattgattgcttgcaagattgaccagtcaccgaccatgttcattacgcccattacacccaaaaaagtgaaccaaaggaacatgattgggccgaaggctttaccaatgatactagttcccattttttggatagaaaacagaactagcagaatgactacagtgatggcaataaccatgttttgagtagaaacgggtacattgccgccaaagttcagtcctttcagtccttcaatcgcagttgtaactgtaactgctggagttaaagtaccatcggccaaaatagcggctccaccaattagcgctggtagaactaaccatttagctcgttttctaaccaatgtgtataaggcaaaaatcccaccttctccgtggttagttgccttgagggcaataattacggtttgtaaggtagttagtagcgttacagtccaaagaaccaatgaaattgatccaatgataaagtcacgatttacattaccaatgccgccgttgccttcgacaattgatttcataacataaagcggactagtaccgatatcgccgtaaacaataccgatggcgattagtaagccggccgcgctcatgcgtttagctttattattcattatctcgttatctcccacaacaaaattgtagttttaataaaaaaagaaaatgccacgatgacattttcccttattgtacctattttcgtctatttcgctggacaatgcaagtgagatttgtcagaaattgaatctagaatttggtgatgataaagttaatgcattataataaaaaatatgcagtaaaaaagctcccatacagggagcctttttgatataaattatgaaagtgatgaaggaatcttagtacgttggtcttcgtcccatttttcccatgcttcataagtaagcatttcttctggcttaacaccagtcttttcttccatggccttaagcaagtccttaaagttgtagtcgtggtattgtaacacatgatcaaccaacttcttgcgtgggaagtggatgttgtttaaaacatagcgattgatatcaaccatgttatgattttcatcgtaaaggttgataacttcaagatcgtcttcatcgaattcagcgatgtagaagttagcgaagacctttaagtaatcaggttgttctttgaattcttcctgtggcatagtagtcttgttagcttctggcattacgactttaaagtcgtcgttttcttcattttctttatcagcttgagcttgagcgttcttttcttcttcagtcaaagttgttacccctttatttataaataaatagatacaaagtcaataataattttacagacttctacaaataaaagcaaatagaagtggttgagagatgcaaaagtatagaagtcagttttgattagtaaaatggagtaaaatgaagtaaaatataaatgtaaaaagtaaaatgaagtaaaatgaggaaaaatatgtataatgaaaatccttttgatgctgaatttggcgggatcccagagctatatcttgattttaatgatgatgcagttaaatttgctcaaagagcccatcgtctcaagaaacatccaacttattctctctttattacaggggtacgaggttcaggaaaaacagtttttatgaacaaagtgggtaaagaactaaaaaaatataaagatactatggtagtcactttgcacaattctgatgatctttttcgaatgatgtatatcaagctagtgcctatgctagataaaatcaaaaaatggacgccatcaatttctattaaagttccttttgtatcagtagatttcactgaagcaaatgaaaagcatgatgaaatatattataaagtagaaattaacaagattcttaaagctttgaacaaagtggggattcgtgttgcattttgtattgatgaagtgtcaaatacacccacaattcaaaaattggctgaggaattcaacgactggagcctaaataactatcaagtttcagtgattatgaccggactattaagtgaagtggcggaactatcaggcacacataatttaaccttcttggttcgggcggatagatttcacgtctctaaactatttgcgtcgtcaattgccagaacttacatggatgtattagacataacagctaagcaagcagaaattttggcagatatgtcaaaaggctatgcttatgcatttcaattgatcggagatttgatgtatgaaaatttaagtcaaaagatgacgtttgaaaaagctttggaatatactaaacttagattccgtgatgtacttttcaaccaagcgtatgatgtaattgctcatgaattaacggatgtggattttcaatttttgtacgctatggcgcaagataatagtattagttcaattattaggactatgcaaaaaagtaagcagtatgttaatagctatcgtgcaaaattaattaaatatgatctaattaagccaataattaggggaaaggtcggctttaccttacctttgtttagagatttcattcaagcaaagtatgatgagcttaactggggctagaatttattgaaaaaattcggcagaaaatcacagaaatgaacgcagatccagtttggagggatactattatggactatgagactaagctagctgaagagcgtgaatacggtgaagaaaaaggaattttaagtgcaattaagaaaattatttatcgtaaccggagctatggtgtatcagattccaaaactttggaggatctgacagaagactaccatgattctgtttcccgggatcaaattgaacaaatgatgaaagaagcctaggtctaatgaaaatagccgctgctcaatgtgagtaacggctatttttttacttgttatcatcagcagcagagctggaacttacggcagatgattgatcgttgcttgaggaagccgcgctggattggttgatggatgataatttaagtaattattcttttgaaaaaatatttcttacttgttggagtaaattatcgaattctgttgattcttttatgtggccgattatttttccatgacgggcaatgaaatcatacgatagcatttgaaataataatgcatctccatttgtgtgactagcataatctagcacatagaatctaaatggatcatctgtaatatggttatgagtaattgctagtcctattactaatccagactttttagtgtaagcatgtctgctcactactaaatagcgtctacgaatatttcctttttcagaatcatgtccacccatttcgtgaccagcatgtggttcagcatcgatcattattatgtcaccttgatggacatcaatccttctcatttgctagttcctttccgacaggtttgacttctctaggattgtatcctaattcttggtattctcgctttatttcagtatcataatcataatcgtcataagcggggtctgaccataaatcataattgtttttagcaattcttttgtatacaatatcaccgtttttatttacatcaacagagaattctgtattaagtggaactttgatagtacttggaatggtaagcactattgaatttccttgttttctagccttgactaccataataagccctccttatgctaaaaatattttattatttaagtatatactgtgaatacagtgagcacaaataaaaggagccacaaattggctcctttttcgttgtgtgtcgggcatggcatttgtctagtctagtgaaagtctagatcacgggtagttgtcgccaagtgtagcgaaccacaagccgttagcggtgacgctatgggtgaaggaagtggctagcgagttttccgagcctacgtacagaaacctggtcaggccaaatggtggatgagactgcagcacaagttaaagtccaaaggacaaccgtaaaaccaagacggtaaaccagggggcagtggaaaattaaagatgaatgtcttaccccgagagatctcgtggacaggtgaaaccgagtaagctttaatatcagcgatcgtaagcctggtcgaaaaaggttaatcgcgagaagtcagctgaggtcgtagtagtgctgaaggttttgtaatgaaactggagcgaagggcctaatgtttgtaagagcatatctcgctataagcaatgttcagacagtccggataagaggatagcctagcacaaagagaacgtaactctttgatggtgaaagcaattgggacaattctgaataaatttacaagtagaaatggagatatcacgagatggaactaattgaacagattttaagtcaaaataatctcaaggaagcaatcaggagagtcaaaatcaataagggagcgcctggtgtagacaggagaacagttgatgagcttgatagctattttaaaaagcatcaagtagaaataaaggacgccatcatgaagatgaagtatcgtccgcaagctgttcgcagagtctacattcctaaagctaatggtaagaaacgtcctttaggaatacccacggttgttgaccgagtaatccagcaggctattgcccaagtattaatgaagatctatgatcctcattttagtgagcatagctatggctttagacctggacgcagtgctcatgacgctattgaacaagtcttggaatatttaaacgaaggctatcaatgggttgttgacctggatattgagaaatactttgacacggtaaatcatgataaattaatttcaataattagagagcaagtaaatgacaaaaccaccctccatttaattcgagcctttcttaaagctggagtaatggaagatggttgggttaagcctaataaactaggtgtaccacaaggcggccctctttcaccaattctatccaatatctatttagataaaatggataaagaattggaacaaagaggcctgcgctttgtccgctatgccgatgactgcaatatctttttcaaaagcggtaaatcagccaaacgtgtgatgaattcaatttcatcatggctagaaagaaagctattcctaaaggtcaacgcaaccaaaaccaaagttgtacgaccaaccaagagcaactttcttggctttaccttctggaaaagtggcgaatactggcaagcaaagccaggagatgaccgcaaaatcaagctttatgacaagatgagagaacttctctgtcgcagaaaagcagctgctcagcctctatcactagtctttactaagataaatcaagtagttagaggctgggtcaattactttagagttggcgacatgaaatattttctaattaagttcagtcaatggctgcgtcataaagtacgggtggtaatcattaaacaatggaaactaccaaaacgaatatacattaacttaatgcggattaacaaggcactaaagtgcaattttagtgatgaagatattcataaagtagctaatacgcgcttaggttggtataaaagaagtacgggtcatgtcattaactttctgcttagcccaaaagtattgggcataagcaaagcggatcgcccaggcttggtcgatccgctagaatattatttatctcgtaaataatcacaaacgtagcgccggatacggaaccgtacgtccggtgcaatgagaggggcgagttataaaactccctctactctattgcttacttgttatcatcagcagcagagctggaacttacggcagatgattgatcgttgcttgaggaagccgcgctggattggctgctggatgattgttcctgctggtgatcgcttgaagaagatgaagaacttgattgatcatctgacttcttggactgctctttatccttatcagatgaggattttgcagaatcatcctgactagaattatctttgttagaatctgcatcagaattattagatttttgctggtcaggatcagcgttctttttattggaattattataggaagtattattgtgcgtttgagtgttggcatggctaatgtaagcaccggcgccacctccacctaagatgaacatcgcagcaataacaccccaaaagactaatttcttcatattaagacaactctcccttatcttagaaaaaatattaacgaatttgagccaattggtgactttgaatcgttagttatagtgtaagacatctggccggcaggttgattacaaaatactcaattttaactaattattaagaggtagaagaaaaatatgaattacgaattaactgaacaatcaatccaatatgtatttggcaacaagaagtataagaatgggcaaaagacccgcaatttgaagaacgtgaagactggcgctaaggcagatgagttgcaaaaggtgggtcaagcaattgctagtttgcaagaagactcacttgatgaagcatacttagtgcagaagtcacgtcttgtaccagcagctgaataaattaacgaacatatttaggaaataaggagaaaaaatgatggctaaaactactaagactatgaagttaactttcttgaacggagaaaagaagaaaattagtattacgttgggggatgcagtcgataatctaactgcggatcaagtacgcggtgcgatgaatacgattgcggaagccaatgcattcgagaaagacggtgttgcatattatcacactcctcaatcagctgcatacattgaacgcactattactgatatctttaatgattcagcagaatctgcagttgagcctgcagctaagcaagactaatctggacttgcttgaccaactaattagcttggtcaaaaggctcaggagaaaatatcgcaagatgtagagttcacacttagacctttaacagaaatcgtatagtaatattactttttcaattgattttgttacatcgttgtaaaatttaagaaaaagtaaagaaacagtaaagcgggcgcatgctcgctttttcttgttgtgtctaggattacggcattttgttattttagatttgtgtgaatggtattgggatagggaataggtgaattattacaaaagcaagattatagtcaatttaacttgctattttttcaagaggttagtacaatatgaatcgtggtaagtaataggacgtgcttcaggcgtgtcgcctgtacgcatgctgatccttcaacaatgactactacctcatgagagttataaactcatggatcttgctttgaagaattttgtacattataggctccctacatgctgaacctatggcctattacattttttatatttcaaggaggaaaagaccacatgaagaaaaatttaagaattgttagcgctgctgctgctgctttattagctgttgctcctgttgctcctgtcgctgcttcagctgtttctgttaacgctgctgcaaccactaccaacacagtatacactgtaattaatgctgatggtaccgcaatcaacactccagctgatgcaaaatacgatgttgatgtaacacctaaccttactgctattgcagcttctactgtaaatggacaaactattaacggtagcattactggtaacattactgctagttacaatggccaatcatacactggtactttagatactaagaatggtaaagtttctgttattgattcaaaggataaaccagttattcattttgggaagcttgctaatggtttatataccgttattgtaaagggtgtatcattcaactttggtattgctaacgcacaccatactatcactcttggctcaaagaacagcaatgttgagttctcaactgatgagggtaagagctttgctaacactaaaaaggttgaacttggccaagatggtactttagagaatcctatttcaattaaagtttcaaacgttaatgcacttgacctttcaaatgctagcggtattaacttctacaacgcttcaaacggttcacaagtaactaagggttcagttaatgtaactgctggtgttaacggtcgtttgaacgtttcaactgttgctagtgaaatcttaaagaactttgctgcttaccaagtttcaaatggtaaggctgtatcacaaatgccagaccaaaaggctgtagttgctgatgttaatgctgctttaaaggctgctaatattccagttgacaatgctggttggtttgctgctccaacttcattctcagttaatgtaaaggtaacttcatcaattaatggtgttgacgctactttacctgtaaccgttaatgttgctaacggcaaggacactactgtaccaagccaaagcaagactattatgcacaacgcttacttctacgacaagaacgctaagcgtgttggtactgacaagcttacccgttacaagtcagtaactgttgctatgaacactactactatcaacggtaaggcttactacgaagtaatcgaaaacggtaaggctactggcaagttcatcaacgcagacaacattactggtactaagcgtactttgaagcacaacgcatacgtttacaagacttcaaagaagcgtgctaacaaggttaccttgaagaagggtactgaagtaattacttacggtggtacttacacattcaagaacggcaagcaatactacaagatcggtgacaacactgaaaagacttacgtaaaggcttcaaacttttaattaagtctatgtagtagataagataaaacgaggcaatttgcctcgtttttctttttgctctagaaaaaggtaccgcttgttgcgacaccctcggaaaatattattgttataacctagctctgcttcagaaattcttctaactgtttatcagagaacacattgccatacttttgctttaattgttgcaggatttgttggctagtgcagccaacatctttcaaagaagcgactaatgtaagtgcacctgttttaaggcctttcttttcaccaacttgctcgcgttcaagcattctagtttccaagtccataatagtatccctccattctggatcggcattcattgattcaatgcgtttttgtgccttatcaaaaagcttgtcaccatgtactggctaattttaaatccaactctataaaccatttgttataataaacgttgacgtttatgccttccaatatcagatctcgcattgggaggtgaacacatgctagatttgtttcactttttattaggctctatcttagcgccacttttagtgaacgtagtttcttatgtcttagagagactatttgacaagcggctaggcaatggtcatagcaaaaggcgtaaaaattatagattgggctctaaaagacatcacaagcgtcactagcctcagccaatacatttagttttaatgctataaaatttggtgaaacaaaaaatcgttactcatttgtccgattagagtagcgatttttttgtgtcttaactctcgcacatgcaagtcgttccacttttatatatacatgttagcatatttttctatatttttctatattcagggtttgtttgcagtatttacgtttaaattaatgttttggctctaaaaaagatgccgcttatgcgacatcttggaaaatattgttgttacaacttagctctgtttcagaaattcttctaactgtttatcagagaacacattgccatatttttgctttaattgttgcagaatttgttggctagtgcagcctacatctttcaaagaagcgactaatgtaagtgcacctgttttaaggccttgctgtaggcctttcttttcgccttcttttctgcctttcttctcgccttccatacgacctttcttttcaccaacttgctcgcgttcaagcattctagtttcaaaatccataatagtgtccctccattctggatcggcattcattgattcgatgcgtttttgtgccttatcaaagagtttatcgccatgtaccggtaaatctttcatgagtttgactaaattaagtaatgtttcagtctcggttccatcaggaactccgtttgaattaattataattttagtcaagccatcctgcaatatatctgcatgattgtctacattaatagtttggtatgtagacttgattgcaactttttgcttaattttgaacgtgcaaagaaaaataatgaagacatttttcaaattattgtaagtatagccctggtggagagtatacctttgatcgtttttcgaagcataatagcgcatgcgacgggcaatatcgtcatcgtctgaccgctgcatctcaatattgtaaaggttgccgttaatatcctcaaccaaaatatcgagtcggacatctttttgatcccgatgctcaggatcgatgattacttcttgcttcttaggcggaaagatcttcttaattaggatctccggcagaattccttgcaaaacatgcttgcagaaagctggattggacatgatttcgccaaaaaccttatcttctgaaaaaccaaaccataattctttttgtttgtgcgtatttttcattgcgcacctctttctaaaaaatagtaggataaaatgtaccctctattatttattacacaaaaaatcggcaaaattttttataaaattgtttttttcagcataataatttctagctatacaatcaatgcttcatactgtataatactattcaatatttgaaacaatatagatatattcaaacatagggagtgtgatggatgtgtcagcctacaagcaacgtaacttggggattattagcttgcccactgacataaaatatcgtaattggtccaaggaccttaccaagcggagaattgagaatgactcgcaattagagcaatacatcaagtatgacaataaatatcgactcaataagaacacattggcagtctatgagttcaagcaaaatcctatcttaggcaaatataaggcagtagccttcgacctgaatcgtggaattgtgcttagtcagaagtcaacacatgccatgatgcaaggattgatgcggcatgccgtacattgcgatatgatttggcagagaatgctagctcgcgaggctggagttgatatctatcaagggattgtcatgtacaatgtgctttatttttcaatgcatgcatttagtggaaacttcttcacggactggatttgcttgcactggattaaagacttccacgtcaaacgccatgatcaagctattttcaacagtattgcacttgatgaaaacggcttggtttataattttgcttttgattctcctaagcccaatcttacgaagataattggtcagtatctgtttcataatcattattattctgacttatattatcagcatatgttgcaagaaaataatcttcgcgtaacagccattaattctgattcaatcctgcataattctaactattatgtgcaactggacttgtacgctattgatagttttaaaaagctggcagacaaattctacaatcatgttttgaacttacacctacttacgattgtgaaagaatttaagccattagattatttgcaccgtgaacaccgcttttttactaagcagattattaagatcagatataatcgttaacagctctcatgagctgtatttttttgcacttttttgactatcatctgttcttcgtcaggtactatctgacttgactttgcttatcgtagaaattaacaaacacatgcgacacttgggattagagcatctcaccactaagtttttttgcagatccaatcttgctaatctaatagtgcacaagcgcttgtgacatcatttaggagagtgtcacaatgacaagtcaaaaatatttcgaagaagcatggaaaaatcgtaagttagttggtggtgccttaaaggcggcacatgttcgaccggactatcatctctatgaagatctgttgcaagaaggtgtaattttgtatgccgagatgttgcgcaaattagatgggcaaaaggttcgcagtgagattgataagcttagcttcaaaaaggttctttggcaaacaatcgatgctctgcgccgagagcaacgcgtatgtgaacgcaatactgcaattgacgaggcttatgacttaggtaaaacagaggcatgggataatcttgtagctttaaaggatgaagttaacaaactaagtcaacttgagcaagtaattctttttgagcatttgcttgagaaaaagacaattacgcagctagttaaagaatgcggtataccgcgtattacgttgaaacgattgaaaaagcagcttttaggtaaattacgtaatgtgatggaacaataagttcattttgtaacaaaatttaatttcataaaaaattttacctactttttgcgtaataagtagtagagggtaattttgctgaagcaataattgaaatgaggtaaaatatgattaaaataaaaagtcgatatccgagaagcactgacgatttggtctttggtcacgtcatgagcaataagaagaattgaatttcagactggtacgcacgttaaagttttcaattctaagggcaataatcatgacctgaaccaaaagataattgacttcttggattacatgaatggaatcatcaatcaccctgaaggttacatcgccagcttgcaaaaggatgtcgaccattacgtgaatagcggaaagtgggtcgaagatatggacaagttggaatatgaaatgaatgaagtcgctaggaaagtaaaaatagaagatgctaagaagctagtcctagtcattaaacgaatgggtggtactaaagacactgccttacaagaactcacaaacaattacggcgatatgcttagccatgatgaaattatcaaactagtacatgaagtttatcagtaaacagtaatcaataatctacagtaaaattatctttcaaaggtgtcgcaacagcgatgccttttttagagcaaaagaaacatactaacctagtgttggatcatgaatcgacggattcacgatctggcactttttattttgtctaaaatagaaagtgaagataaagcaaatcaagtcttcagctttttagacacttgatgtcgtaaaagaaacggactgctttaccacctattcttaagtctcttcgaagtctgtgggcacttagatgccgtgtttagaaaattagaattaataggttgataaagaggtttatcttcacagcggaggttatattatggaatcacaaattattttcggtattgatgttagcagtaaatcttccacagtttgtgtggttaatgaccggatcaaacaaggcgaatcttttagaatctctaatgattcctttggctatcaaaaactttatgagcaactgaaccaatatttgataactcctttagttgttttcgaagctactggtgtttattctctaagcctgcaagctttcttagaggattatcatattaagtatttgaagcttaatccgcttaaagcgaaaaagctaatggacaataatttacgccataataaaactgataaggtagatgcttatcgcctggctttaattcaatttaatgccccgcaaaagttgcgtgatccacagcccagagagtatcatgaacttcagaatgccagtcgctattatgaagaacttactaggagtatagttactactaaaaatcaattgcaccgcaacctccaatccactttcccacaaattgaagaaatactgtctcatccatctggcagaatttattgggcgcttgttagtcttttcccacatgctggatatgttctagaaaagaatgagacacaggtaactcaaatgcttaattctatttctggaataggacaacaaagggcacggtacttaaccacaagattatacgcttttgctagagaagcttatccttatgattccaaagatagtattatcgttagagctattcaaaggaacatttctaatttgttttcactccagcaagaacgcgactatgtaattaactacatggaaaagctggctaaagcagtaaacgctcgtgctttatccatctatttgagtatcccaggggttgctagaattacagcagtgagattagtagcagagctcggtgatctaagacggtttagcacttcagctcaaattgatgcgtttgttggcattgatccaggaaggtaccaatctggtgaaaaagacagttctcttggcattaccaagcatggcaatcatattgccagaaaaatactttatcgagttattattcaaatggagacggtaaaggctacgcagccttgccatataactgattattatgacaagaaaaaacgatcttcaaatagccaaggctataagaaaatcgccattgcatcagtccataaactgatacgcacaatgtttgctcttatcaaacatgatcaattatatgattacaacatagccaccaaaaataaaagactttagctgaaatcaaataatcaacttaagtataagcaacctatggaaaaactacaagtattcataggcttatttgtggtactttcgctttttcttaaatttaaactcttatttgctttaaccttattcgcatcattaaaacaagtaaatttattttcttaaatcattgataatacttgactttgggtagaaaaaagttcccccaattttatgttttataaaaaaaacagtatctatgctaattatggttctcaaattgaaaaatggataatttgatgttggaacaattgatggtattcaagttaaatactgcttgattggttgttagaagagtaaaaaagccatttcagtcacatttttgctgaaatggctttttctattttccatcttttaattatattatcttgaaatgacctcttcttatcctgaagtgtagtctaccaaaaatgtcagagattatttcgttccttctcgtagagtaaattattatcctaaattctattctcgttaatcatgctatcaggcaatataattttcattcgatcatcgaacatattgaagtttacctcagagccttgaatctgataatcataatgaatcaatgcattaactaaaacctctcgaataaccttaaatggtttaaatatttttatattgcacctgtatcataatgataaaaaagttaacgaatgcaactcgttagctctagtcgtagtctaagataactattagcttaatttttaagagcaaaagaaaaacgaggcaattgcctcgttttaaattattttctctttttagtatgtttgacagttttcttatgtgcctttttgtgattcttcttatgagctactttattatgtttcttcttggtaactttcttcttgcatagtatttccagtaatattacccaaactagtatgacttaatcgaccattcttgaccgcaaaatcaaattcaagattaccttgtgcaagagtactgtgtgcattaacactagcagaaccaataatttcaccattgttattaacaatagtaactgaacgatcagttgaagttggcgtcaaacccattattgttacttgtgcatttaaagtatatttaccattgtttaaaactgcatcgtttgtttcaatttcagtaccagtattattagtcaaatggatgttattaattgaggtagaagcactaattctagtgctgtttgtgtatacacttctatcacgaagatagtgagtgacaacactacttttagttacaactgcagctgcttgaatagtatttggggcagctaccaatgaaactacaggcgatgcagcgaacaaagccgccgctacaatactagtaaatacgcgtggtgctagttaaatcgttttagttaataaaaaagtccaattagactagactcaagttgtaagtaatttaaatagaaaagagtctgatctaattgaactatctcaagcttaatcgtttttctcaccatttacaagttagttttaatcggttaaatgtgatttgtcgctcgctgtataagctttatgcgcctgatggacttaaacatcgtaaaaatgttgatcagaccaagcttcctgatagttctatcttagcgatgctcatttggcaaactgaaattggaattgaatctcaacgaagattctgtaaattcttcgttggcttatctcattctcgttttaaccgtcgagctcgaatgctcttgcctctaattcgttgtatccgtcagggttggaatcaggaagtaaaggtaggtggagaattattgattatcgacagttttccgattccagtttgtcagcctgttcgcaattatcacgttaagatcttccgtggcatagccgatattggttataaagcgacgaaaaaaatctactattatggcttcaaagtccacgcaatagtgagtgatgatggctatctgcttgactacgcagttactaaggcgtcggtacatgatgcaaaagagacggtagaattgatgatcaatgctcatccaattaaccattatcttttaggagatgaaggctatttaggaaaagacttagcagccaagctaaagcgtatgggatacgtgctttggacaccatatcgtaaaaacatgaggggtgctaaaaagcataatgatcatcagttaatggcaattagaagaacaatcgaaagcgacttttctttgcttagctattacaatgctgagaataatcgagccaggagcttagtaggttttcaacaacggctagaaatagctattttagcttataatatggcatattgtctagaacgatttaactagcaccacgcgttagtaaatttaaaattctttttcattattatttcctccaaaaaaagacagagctttcgctctgcctttcttatttgtcagcgtataccacagacttaattaaaagtttgaagcctttacgtaagtcttttcagtgttgttaccgatcttgtagtatcgcttaccgttcttgaacttgtaagagccaccgtaggtaacaaccttgtcacccttcttaagaacaaccttattagcacgcttctttgaagtcttgtaaacgtatgcgttgtgcttcaaagtacgttcagtaccatcaatgttgtctgcgttgatgaacttgcctgaaagcttgccgtttccaactacttcgtagtaagccttgccgttgatggtagtggtcttaggtgaaacagttactgagttgtaacgagtcaacttcttgtcagtatcaacatgcttgccgtccttgttgtagtagaaggcgttgtgcataatagtcttgctttggctagcaacagtagtatctggcttagtagcagttaagtctgaactcttaacgaattcgtttgagccgtccttgttgatacgagtgtattcaacaccgttaacagttaccttaccgaatgtgtaaacagctgcgccctttgcaagagctggaatattagcagcttctgaaacaacattaccgttaatgttgtaaactttagtattatcagcctttacgtattcttgtggtgccttttcagtaggacccattacaattgcgtaaacagtaagctttgaagtaaagccagctggattagtagcagtaatagttactgggtacaaacctgcaacacttgggttaaccttgcttgagtcaatcttaatattgcttgagttgatcaattgttggtgagcagctaattctgctggagtcttgtcgaagccagtaccataggcactttgtacgtaagctttaacagcaccagttacagcatcgttgttaaatttaccatttacaataactttggtcttgtcagtgtccttaagtactaagttacctgaagttttaccatttgacataacgttgtcattgtagtaaacgttgccgtcaaatacaaatgcaggtgcattgtagtttactgatgcattaattcttacagtaattgtagttgaattaccattttctgacttagcagtcaacttaaggttgaaaccgtttgctggataatcaaagttaccgtttgaagcacgcttcaagccttgagctactaattgactttctacatctgaagcggtagtagtcatattaatagtgtcatttgattgatcactggtcttccaagcatagtgcttttgaatagcattcaaaagatctgatgaactaaagccgttagcaatttcgtttaatgaaacagtgctaccatcgtttacaacagtgttagtatccttgttgtagaagtaaggagtaccttgttggctagcgaacttagcatttaaagtaacttggtaagctctgtcattaacagtgaatgtaacaacttgttggaattcaccatttgagtttgaagcagatgctgacttaacagtaatattcttcatatcttctggcttagcatcctttaatgcatcgccacctaattgtaagatagcatccttttgagcatcgctcaatttgatactgaattgagtatttgaagcacggtcaagaacaatggtgcctcttaatgtaccaaggtcagtaacttcttgagaagtagcagctgaaacagtagaagcaggtgcaacagtgttggtagtggttgcagcagcgttaacagaaacagctgaagcagcgacaggagcaacaggagcaacagctaataaagcagcagcagcagcgctaacaattcttaaatttttcttcatgtggtcttttcctccttgaaatataaaaaatgtaataggccataggttcagcatgtagggagcctataatgtacaaaattcttcaaagcaagatccatgagtttataactctcatgaggtagtagtcattgttgaaggatcagcatgcgtacaggcgacacgcctgaagcacgtatattgtgtactcgatttttttcaagcaatgaaagggtggtttctgtcctcttatttgcttggggtcggttgggtggtttttgtccgctgcgcagatacttttatgaaaaaagagtacgatgcgatttgatgatttagagtgtcatttttggttttgttaagggatgcttgtaaaataataaggtaaagaaaatctaaagaagtaattttgtgaaaaagaaatcgacattttttgcgtacttatatattgtcaaaattaagatatgtaggtgataactatgttaaataaaaaggataaaactaaaattcaagaattaactgataaaacagtggacttgatcgtagaaaatatggggaaatcgcgtaaagaagcggaacaagattttcaaaagtcagatacatatgcgttcttatggctagcgaagcgtaatatcgaaaatgcgcaccctattattttgtacagaatgtttaattctgagttaaaagctaaaccaatagacgaagaacaacaaagttttattgactttatgactgataacacaatcgagttaattacacagaatactaatttgggaagataaaaggcaactaaagttttcaaatctacaaaggtatattggatactagttcactcaggacataatttagatgaatcttctcccgaagagctgtttgatatgtttagaaatgaacttagtataggtaatccactaccttcatctatgctgaagttaacttattaaaaaatttatataagttaaataatattattacaaatgttacttttttacgacaaatctgttgaaacgcttgtctagacctaatttgatagatacaatggaggtgttatattaaggaggataattttttatgaagaagagacttttgaccagttttgctgctgccgcaatgcttacttctgtagctgtgccagcagtaaatactacgatgatgaatcaagcctcaagccaacgagtttctgccgctaccgctgatcaaactgcatttttaaacaaggctgccaagcaggcagttaaagcagctaaaaaatatggaactttgccatcagtgatgattgcccaggcaataactgagtcaggctggggaaagtcaggattagccgtgaatgctaataacctttttgggatgaaggctgatgattcttggacaggtgagacttatactgccaagactagagaagaagataaaaacggtaagagctactatattactgctaagtttagaaaatacccatcttttgaacaatcatttgaagataatgggagtaagttgagaaatggtgtttcttgggatccgttgcgttataagggcacttggattgaaaatgcatcaacttatgcagctgcaaccaaggctttgaccggtacgtatgctacagactctaagtatgataaggcattaaatagtcatattactagttctaatttgactaagtatgatccagtaaccgttaatactactagaacttatactgctggcaaggatagttcaacttataattggccaactgctccatctgttgccagtgttattggctctgttaaagctggtgaaaaagtagtagttaccaagactattactttccatgatggttcaagcagaatgtatattgatggtcgcggttgggttaatggctcagttttggacaagagcagttccgcaactaaggaaccagtaactcaggcacctaagaatgtgccagctgtttctaagaacttgatgcataatgcctatgtttatgaccaaaatggtaagaagctaaagggcaagatgtacaagaccagtgatgaaaacggtggtaagtggatcaatacttatggtaccaagaccatcaagggtaagacctactaccgtgtcggtgaaaatgaatacattgcagctggtaatattgatggtagcctcagattcttgaagaagaatgcttatgtttacaatcaatatggcaatcgcgataacaatttgaagcacaagaagaatagccaaattgctacttacggcagtgctataactatcaatggtaagaaatactataaggtaggtattcgtcaatacgttaagaaatcgaacttcatgtaattaaggaaagggctttgttgtgaagatacgcaaatttttaattaccttaattgcgcttttggggttagtcggcgtatcatcggtcagtaaccaggtcaaagccgcttcgattaatactttagcgaagaaatatcaatatagtggtgtcacctatttatacaagatgctcaaactagaggggattaagtacaataaattccctggtgttgagtatcaaaatggcaagccagaaggaattgtcgttcatgagactgacgatcccggagctactgctcacgatgaagcaatctactttaaccgcgagtggaaaaatatcaacgcttacgtcaatgcttttgtagatagtaagcaagtcatccaaatgtattcacctaataatggtacttggggcgcaggaccgaatgccaacaatcgctttattcaaattgagctttgtgaagaagatagtcgtgatgcctttgctaagtcagttaataatgatgcaatttatattgccaagttgcttcatcgttacaatttaaagccagacaatgcttgcgatgatggtgaaggcacaatttggtcacacaaggcggttagcaccttcttaggtggaacagaccacgttgaccctgatagttattttgcccagtgggattacgacatggatcagttttattctttgatcgagtattactatgacttgcaaaagaagaatgaaaatactgatactaaggatccaaataagattaaggacgaagtaccagcagaagttcaaggtgcggtaactttaggtcacgatgcttatgtttatgacaagaacggcaagaagaccaagatcttgaagttagctggtagtccggtaaccgttttaggctacaagataatcagtaataagaagtactatcaaattggaaagaacgaatacgtagtagctactaatattgatgctactgctagaactgttaagaagaatacatatttgcggactcgttcaggtcgaattgaaaaaggtaatttggtcaagaagggtagtcgggtcatgacatatggcagcaagattacaattaaaggtcaaaagtattatgctttaaatgctacacaatatgttttagctagcgatattaattagaaaaatacgtcttaaaccataaataatgggaattaagacgtattttttgtataattcttgtgttgaatgtgaaaaggggagaatttaatggcgcaattatcattatttttggtcgtcttattagcgctcgtaattccaatatttatggcgcgtttcaaaataagcactgtaccaacggcgattgctgaaattatcgtcggaattattgtaggttcgagcggatttaatatcgtggtttcgatacatgatttaacatttttatcgaacctcggcgtaattttgctgatgtttttatcaggaatggaaattaattttgacctgctacagcgcaagaataatcctaaggctaaatcacaggcgggaaaaactgtcgatccgttgccaacagctttaacagctttcgctggaattgtggtaatggcctttgttttggcatatgttttaaagctgatagggctatttagcaatgttatcttggcagcgattatttttatgaccattgcattgggtgtagttattgctaccttgaaggaaaaggatattcttggccgaccgattggtcagacaattttgttaactgcggttttgggcgaagtaataccgttgctcttattaacgatttatgcctcagttaatggagggaatgctggccagctttggttgattatcttactgtttatcgctgcgattattcttttgcggcggtttaagcaaccgtatttatggtttagcaaagtaactaaggcaacgactcaattggatattcggttagccttcttcttgatttttgctttagttactgtagctgagcgagttggtgctgaaaatattttgggagcattcttggccgggatggtaatgaaattattggaaccaagcgaggcaactaaagataagctaacttcaatcggttatgggttctttatcccaatcttttttattatgactggcgtgggcttgaatttaaagtcactatttgctcatccatcatcattgatgttgttgccagttttggtcattttcttgttcttagctaaagctcctgtagtttttctttatatgcgctattttgaaaagaaaaatgcctttgctggtggctttttaactgctactacaattacgattgttttgccaactctacaagttgctagaaaattgcatgcaattacttcaacacaatcagatgcctttatcttagctgcggttattgtttgtatcgtgagtccgattgtctttaattcaaactttgttttatcacctgaggatcggatgaaagaaactgttactattgtgggtgccaatacttttacggtaccagttgcacatgatttgcatgataattggtatacgatcaagatgtttaccgatcagcaggaccaatacgaaacttatgatagtagggttaaaggtttaacattacttgataatttggataatcaaagcttagagcgtagtggtgcctttgattgcgacattttcgtagctgcagggcatcatgatcaagaaaatgcacgaatggcggaatatgccaaagacttgggagtcaaacgagcaattgcccgaatgaatgaagtcgatagcaatacgatggctcgatgccaggaggcaggagtagagttgttcaactttactaatgtacgttctgctctgatgcgagctttgattgagtctccaacggtctacaagattatgactgatactaacaatgtgttgtactcagttaaggtgagaagtacttcctatactggacgaccacttagggatctggaatttgtggacaagattacggttagtcgaattcggcgtggtgatgagtggttaataccacacggttggactgttattgagccgaatgatatcttgatcttttctggagaatttaaggttgctgatcgagtaaagaagttacttagtcatcaaaattagagataaaaagaggctaaatgcaaaaatcctgcatttaacctcttttttacgtaattaatgattttgtccttcaactgcttcaatgtcgccttgtccatcgcgctcaacaatagccccaattgcagcgattaagcctttaacaatatcggctaatgccattgatggagtgcttggtcttttgacaacttgttctggcaaaaatgggatgtgaatgaagccagctttaaggctagggaattctttagctcgcatgtattgcacttgataaaagatgtggttgcagacgtaagtaccggcagtgttggaaactgtagcaggtagaccaacagcgcgaatcgccttagccattgccttgattggtagttgggtgaagtaagccgtgtcgccatcggcttggataggttcaccgagcggttgataaccatcgttgtcggggatgcgaccatcgttaatattaatagctactcgttctggggttaaagcagcacgcccaccagcttgaccaacattaagtacataatctggtttttcttgcacgatggcatcatgaacaacttgggcagatttattgaaaaccgtaggaatttctaatttgataatttttgcacccttgattgagtcaggtagttttttgactgcttcaatggcggggttgatcttgtcgccaccaaaaggatcaaaaccagttactaaaattttcaatggcttttcctccaaatttaaatcatagaattttttgctttagtcaaaatttgcattgtctctaaagtattgacaaatgcttcatccgctttttgcgtatcgtgttgatcaatcatctgggcaaaagtattaaattcagctgccattcggtgcggatatttatttaaattataacgcttaggttgctcatttctcatttcaactgtgaaattatcaagtgttcccgttgagccgtcaaaatagatactacctttttcaccttcgataaaagaacgtggcgttacatagctatcttttgatgccgtgagggaggcttgtttgtcaggataagagaggtgaagaataccagaagtatcaacgcctttttgcatgttggcataatattgcacttgatcaggcaagccaaacaatgccgagacaagatgaatgttgtagatatttaaatccattaaagcaccgccatcttttttaggatcaaaaaccggcgcaattttgccttcaagaaaggcgtcatagcggctagaatattgcgtataatttaggttaacaatatgaattggtgcgatcttgttcaattctttttggatttgtttgaagttttctaaataaaggttagtaattgcttcaacgatgatcaaacccttttcgtcggctaacttttttaattcttttgcttgagtggtgctctgaacaaatggcttttcacagattacatttttatcgtgttctagagcagctttagcaatctcataatgcaagaagtttggcaccgctacataaactgtatcgacttcagaatcagccattaattcttcattgtccgtataagtacgtttgatgttgtactttttagctaattcccgggcaatattttcactgcgcttagttgaggaaatagccgttacagtcatattcgcaacttgatcagcggttgttaaaaagtcatggacgatcatgccgctgccaataattcctaatttcatttttttgcctacttctttttagtattagtggttggtaaatctttagcgttagttgcagagtctggtactcttaagaagtcatggctgccgaagttgccataactttgaccaactttaacgtacattaatttacctagtttcatattaacaaagacattaaaggtagataatttattacctttaattacagccttaacattcattgattggtacttgcctaattttttaatttggctgaaaattttagcttgatttgtactttgagcagtagtgtcaaaaattggtgctgctgcctttttcatcaaagcttggtcagtacttttagcagttaaagtataagtgtaaacaccatcttttttgctttttttcattttataagcagaaaccaacttatcacttggattggtgatcatgtggttattcatgatggcatcggttaagtcggcataattatgaccggttagtttttcaaggtcagccttgtaccaagtatcttgtccattaatgtagacattgttaaggttgacccattcctcagtagaactagttttacctttgctagtggtttgattggtgatgtggtaaacagtggttttaccaccaaaggtagtgttagctaaggcaacttgattagaagtgtcggtacccagagtaacagattgaataacctgtcccgacttgaagctacttttagctttttgtacaacttgagtcttagtcagagctgaagtagccttcttctcttgtttactgcagccacctaataaaaagaggacagcaaaggataaaccgataatcgttttcttaagtttcatttttttctcctctatgcttcaataagtctattataactaaaaagtccgttgctcgttggagttacggactattcttttactttattttgtattaattttgcctaaatctacggccgatttcttgatagaagcaggtaccgtcaactttttgacttgattaatttgatcaatctgcatggtgaaattctttttgtgtccttcatccttataagtagaagtcacattaacatttttgatgtcgtaattctgatctacgttaattttgatttcgttgctaattggtttaacatcatcaagatcgatgccgattaaagcagtaaaggcagaatcagatacaattgcgttccaaatttttttgttatttcctttataagtaagcagataatcattgccgttttgctttaccttaaaatattttgcgttagggatgaaaggcatgagtaatgtgccgttcaaattgtcggtaatggcaccataggcactagccttagacaactttgtcttaaaccaacgctgagaattggtacctttcatttggatatagttgcttttaccctcaatccacattttatagtgattagagctgctagaaacattagcataaataatcgttggctttttagtatattgggcttcggctttttgcaaagacttgccattgcttaattcattccaagtagcgtgcattgaactgaatttcgttttttctgcactggttaaaatcgtcttggcagtaggtaaattagctgtcttttttgaacctgtcttagagcaggccgttaaaaagagtaatgctaataaaacggtaatgataatattttgatgtttaaatttcatacataactttctttcattaaattttttcttctagtatagcaagaataacgttacaaaattgaaaaaacacgatttttttagtcttaactctatgaaaaaatttgtgaaatgtgtaaaatatggatgaaacattgaattttaaaaggagatatttcatgtcaaaattagttttaatccgtcacggtcaaagtgaatggaacctttcaaaccaatttactggttgggttgacgttaacctttcagaaaaaggtgttgaagaagctaagaaggctggccgtttaatcaaggaacacggtcttgaatttgaccaagcttacacttcattattaactcgtgctatcaagactttgcactttgcacttgaagaaagtggccaactttggattccagaaactaagacctggagacttaacgaacgtcactacggtgctttacaaggtttgaacaagaaggctactgctgaaaagtacggcgatgaacaagttcacatttggcgtcgttcatacgatgttttgccaccagctattgatgatgacaacgaattcagtcaagcacatgaccgtcgttacgcaaacttggacccacacatcgttcctaaggctgaaaacttacacgtatgtcttgatcgtgtaatgccattctgggaagaccacattgctccagatttacttgacggcaagaacgtaattatcgcagctcacggtaactcacttcgtgctttgactaagtacatcgaaaacatttctgatgaagacattatgaacttggaaatgaagaccggtgaaccagttgtttacacattcgacgaaaacttggatgttgttaacaaggaaaagttggacgactaatttattaagtagttattcacacaaatagaacttcggcgtaagtcggagtttttttatacaccaaaaaaggcatcaccgttaagggatgccttctttgtatcaacttgctccaaaaactataattatttctttgatttcataatttttttggaacaacttcattatattataaataaagaaagatcgccatttttttctaagaaagtggtgaaaattgacagttgtatatgataagtgctattttgagttacaggagtgtagaaattgggagaaaaatatgcaaacaatcgataattctctctttcaagtctctgtcgatgagaatggggcccggatggcacatctggtgtctttaacagatcaatttgattatctcggcgagcaagaaagtgaagaaggtatggcacttgcttttccagtaatggatcaagccgataatttggctaacaagttgccttggaccgttgttgacaaaggtgatactcgcgtaagtctaactttaattgatacgccggagagctataagagttttccatatcattttgaagtaatgactacttatgctttggagggtaatcaagtcaatatatccttttatttaaaaaattcttcaaataaggaactgccattttctttgggctttatcttaccaacttcttggcaaagtgaaagccaggtcaataagattagtttgactggcaaagaacatggcattgatcttacttcaactgattttaagttgagtgcaaaagaaggaagcgttacagcttttacggataaaattgaattagaggcaaaaagtagccgtaattttgcgttaagcttgactttgaagtaaaaattagtaacgattttaataagatatactaagcaagtcagcgatgatttgctttttttgttataatacattcaatgtgaatttacatcataataggtatattttatgaaagatagaaaacaaagatctaatcacccgcataatagtcgggtagacacacacagttataaaaatcgtcatatttgggtctgggttattagtatcgtagccttgcttgcggttgctggagcggcgtactttgcatcagtttatttccgtactaagtcagcggttgataagacctatgatcctaagactgcagtgaaaactacaggtgaatttgatggaaagaagaagttcgctgttttactgatggggactgatacaggtgcccttgatcgaactgaaaagcgcggccggactgataccatgattttagctgtagttaaccctgctaagaagcgttacacattggtctcaacaccgcgtgatacgatggcacagatggttggaagcgagagcttcaagacagaaaagattaacgccgcttatgaattaggcggggctaagatgtcaatggattcagtttctaagttaatcaatgtgccaatcaagtattatgccgtggttaacatgggtggaatcatgaagatgattcgctatgttggcggaattaatattagaccaacgcttagctttgaatatggcggttatatttttaaaaagggcaagctgacccatatgggtggtgcaggtgcgctagcatattctagaatgcgttatgatgatccgcgtggagattatggtcgtcaagaacgacaacggcaggtaattaccaccttgatcaagaaggcagtttcaattagttcattatcaaatctggattcaattttgacttctgtgtcaagcaatgttcggactaacttgccatttagtgcgatgcagcagattgcgatgaattatcgtagttgtgccaattcgtcatctagtgattatctacatggttacaatgcaatgatcgacgatgcggcttatcaagtacagccaactagtgaattgcaacggatttctaacctggtgcgcaaagaattagggttacctaaggaaacggtttcaaataatgaaactttccaaaacgaaaagaatattgcaaatggctttagctttaagagcgaaaaaacgcagcactatcatatctatgattacaccgaagaaggtgataattaatggcgcgcatttgggctactctgattggctacgtttttggaaatttcttaacggcgatgatcgttggcaaaatctttttaaaaataaatcctactgaatacggttcacataatccaggaacggctaacatgggtgctgtttttggtaaaaaatggggtattttaacctgtttaggcgatttgcttaaaagtttaattgccttgtttattgtatattttgcttttccagctcatattaatattgcttatacagggctaggcctgatcttaggacattgttttccaatctgggatcattttcgaggtggcaaaggagttgcggttgcagctcaggtagcagttttttataattggaaagctggctttgctactttattagtggctttggtattaacagcaattatgcaaaatttgacgattccgcctttagtgtttatgcttttattcagtataaatacattcttgcataatcaagaagcaggatttgtttttatcgtgattactttgatcatgtgctttaagttctggcatgatatcgtagactttttcaccggtcatggcaaaaaggttgatattctgctttcaattaaaaagaagctagggatcattaagtaatgacagaaatttttagtgaggacacagactagagaaaatgagtgagattaacaagaaaaaatcactaaatgctcttcaaatcatttgtttgattgtcgcagcattctttatgctagtgcagatgtattcttggggtagcacttttggtagattaccattaagtaccctaatgagatttattccaggactacttggtcacagtacgatggtactagtaccaatggtctttggtgctgtttatagcaaaagaaaggttcatccaactgaagcctttaagttttggattatagcggttgttacactagtgcttttatacttggtgaacttctttaaacgaccaggtacctttaatatgtggaagctctggggagtatttttcccagttttgactagtacatcagtattgttggctggcttgatttttagtatgctagttcaaccatacttgtatgaattacaacatcgcattactactaagcaaaatgtattattgcttagcgcattaactttgactggttttgcgactagtgcaggtacaatgatctttaacaagtcaatttatggcatttatttgatcttgtactttgcttgggggatgtttttagctaacgttaaaattcctaaaaaggtctttggctggtcaattgcagctggagtaatgtctttcttcgtaatgtttatcggtattcccggatttaatggggtttactggtaccaacgattatctggtcgaagtggcgtttattcctggaatcctaaatttttaagtaatattgcttcaccatttttgttcttaatggttttagcagccttcttaatctttagaaaagtgattgttagctatagtgctaagcagatgcacttctttattccagtaattatttttatggacgctccaattattggtggttttgttaaatcgttccgctttaccaatagcgctggatttaacaagttcttgatgattgtcatcatgatgctagctgcctggggcttaagctggctatatgagcgctatttattcaaggtgaagccggttaaacggacggttgcttttttcaagcaacataataacttagcagaaattgttgaagatgcttggactaacttcactgcttggatagttgaaaatcgagtacgactacttacatggggctggttctatgtattaagttttgcttcattcttaattgaatcagataatctgcggatccaaattacgactgcaactgatatcaatgccgtaattttcttgctcgggactagattcttcgctattattttgacagcaatcttccttgatgcaatgtttgcaattttctacttcattactacgcgttactggacttcaacagttttagtaactgtaattacaattggttgggctattgccaacaagattaaattagatcttcgtggggaaccaatttatccaactgaattagacgaaattgttaactggaagaccttgatgccaatggtcggccaacaaaagataattatgatcgctattgccttagtaattatcattgcattgactgtctttcttgcaattaagtttccaattaagaaaaagggctcatggaaacgccgtggtatttgggcattgttgagtttgcttttgttcatgacaccagtgcgctttaaccacgatggcggaattatttatcacattaaccgtggctttgataataagcaatcgtttagaaaccctgaacgtgatattcaaattaacggtccattattgaacttcttgaattactttgacctgcagattatgaataagccaactaactattcaaaatctacaattcaacatttgaatgagaagtacagcaagatcgctaatgaaattaacaaaacaagaaagaatactctaaagaatcaaactattgtttacaacttgagtgaaagttttgttgatccatatactttcccaactgtaaagatcgatcctaaggtgccaaatccagttaaatttattcaatcaatggctaagagatctacttacggtagcatgcttagtgcaggttatggtggtggtactgccaacatggaatgggaaactttgaccggtttcaacatgggaatgttcaagtcaaccttgacgccatatgttcaaattgtgccaaaccatgatttctatccaacggtcggaatggacttcaattataagtctgcagttcacccattcattggtacttactactcaagagtagaagactataagagatttaagtttaataagtttgtttaccttggctctaaatataagatcattgatcaaaagaaacttggtaaatcaacttataattctgattacactacttatgcaaatggtttgaaacaaatcaatagcatgaagggtggtcaattcattaatttgatttcaattcagaaccacatgccttacaacaattggtatccaaacaatgaatacatgggcaaggtatctggtgaactcttcaacactgctgctattcgtgaacaaatggcaacttacatgaagggtgttcaatacactgataaggctgtaaagcaatttatcggtaagattgataagatcaagaagccaatcacagttgtcttctatggggaccactacccaagtatcttgtcacaaaactacgctagtcgttatccagtgcaaatgcactcaactcgctacttcatttattctaacaagtatgctagagaacatggtgctaagagcaagttgactcacaactctaattacgtcaacactagtgactttactgcaatgatgcttgaacaaactaattctaaggtaactccttaccaagcattgttaacagaagttcacaagaagttgccagcaatcacgattaacttcaatggtgatcaaggcttccaattagttgaccaaaaggggcacttcgttgatccaaagaaattgacttcagaacaacaagcaattttgaaggattacgaaatggtgcaatatgatatgactgctggtcaagcttatggcttaaaagctaagggcttttacaagatcggtgactaaataaaagagatcgaacgtaaagttcggtcttttttctacgtaaagtcaagcgcaataaggtgtttggctttattttttacctaaattttgtcatgagtatcttttagtggcgatttatttttttagaaagcatactaaataagcccacctctatatttaatttatgggcttagcgttataatgtacttgatcaattaattacaactaaagtctttttggttatgtgtggctacgttgtaatcatatagttgatcattgataatcagagcataaatggttctgattagtttatgaattgaagcaatagctatctttttgaaccctttggtttgagaggatagctttttgctttcataataatctgctatatgacacggatttgtcttagctgcattatcaatttgtccaatagctcgataaagcaacttacgtgcgactgcattgccatgtttagtaatacttaaattagagtccatttctcctgactgatatctgcctggatcaattccgataaaagcattgattttattaggattactaaatctgcgtaaatctcctaactctgctaaaactctgacagcagtggtctgtgcaaagcctggaatgctttctaggttttctaaatcatgattaggcaaagacttcgctaacttaaccattcttgcgattaaattttctctttgatcacttaaattaagcaatctgtgtgcataatactgcacttgctcgacttctatgctagagcaagatacaactggataagcttgataagctaattcaattaatttatctgcagtccttagagcgtgtttaaaagcaatcccctttaagctcattaaccagttaataagctgttttttatcttctcttcttactaagtcacaatgaggatatcgcacaactatttgccagtaatttttacctttagcagaagaaaatagattttcaatttcaggaaaagtcgattgtagagcttggtgaagtcgatttttagccattactaagtcagctgttaactggtcatagaagcggctcaaagcattaagctgcttataagtttgagattgaagttgattaattggatgatgatatagtctttgaattaaggctaaatgataagcatcagttttatcagtcttattatgacgtagtcccatatccatttcttttttagctttaagaggattaagaattacataatcatagccatagtcttccagaaaagattgcagtgtacgtgaataaacaccggtagcttcaaaaataatttgcggatgtttagaaaaagcggttaattcatgaagcaattgaataaaaccaggacgattattagtaatggttagttcatttttgctttcaccaattagttcacaaacagtagaagtagacttgcttacatcaattccaaaagtaacttgcataataaaaacctccaaaacttagtagtaaaacgtatttacttaagaaatcagatctaattttctaaactcgacatctagtgtccacattcttcgaagagactattgaaaacttaagtaaaactgccagttttgtatacgacatcaagtgtctaaagacctcagggcatatcgttttactactactttaattctacaaaagaataaaaatagtgaatcaattatcccgtcggataactaattcactatttagcttagaatgttttgtatccaatgataaaataagggctaagaggaataactgataattagctgatttaaaggtgattagaatgaaaaagataataacaatggcactagccagtgctgcactatttggatcttctgcaacaactgttcaagctgggacatataatcctaagaacattaccagttttaatattaataggcgtaactatgtagctaagggaaagatttataaactccatttacccgcagctggtagattagttactaatggcaatgttactttaaaaaatagtatggaatggacctgtattccttatggtaaggacaaaaatacgtattatctgcgtaaaggcacatattatttaactagttcaaagaatattagtgtgaagactacttatactcgtttaactaagatccgtaagaatttagaaacttacgttgaaacaaagaagaataatgacaacagtagtcttaaagctagaaagattgaaattggtcaagatattaaagcaatgggtgaaatgtacgattacgatagtgtcgactactacacatttactattgactcacctcaaatggttacgatgaggatgatcaataatccgatttatcagcttggaaaaggtaacattttcagcaagatgaatgtaatcatgttcagtgaaaataatccagttggcggtagtacgatgctttacccagagagtttcgaaattaatggcaataagattgctagtcaaagctggtacttgtctaaaggaaattatacttttagtgtaaatactcgtggactttataattttcaattaacggctgttcctgatacgcgtgtggtaccggcagatactgagatagaatctttacaaaacactaaggatggtatggttgctaacttaagggatgcacgtcatgcgaagacttatgaacttgcatggcgtgaaaaaggctcaaaggcagctccattcacttctagtagcaatactacagaagtaagtactgcacctgctacacgttacatagacaaaaatgatcgtaaaatcccagtttcaattggtaaaaaattagttaatggtcaaagctactattttgtagctcgcggtgtaagcaatcctgattacattcgttacggcaatccggaaaaagataattattttggtgcttggagtaattcagtagaacacacttactatgcaccttcagatgcaacaccaggtgcagttgatttaaccactgctaaagctgacagtacttatcacaacattcatgtggcttggaataaaattgctagtgcacaaagttatcgcattgcctaccgccaaaaaggtacaaataagtggtactatgaagtaactgatcaggctactaacgcgattactggtattactagaaatagaaattatgaagtgaaattgcaagcattgaatggtgaaaaaactggtccatggtccgcaattaaaacaatttttgtaaaatagcggttgactaaaactatttttctcgttaatatcataactaacaaatgagtagcgagtcggctcagcgttcagagaactagcggttggtgtgagctagacaggccgattttagcgaagtacttaatagggttgctcctttaccggcttgaataaggcgcagcagcgcaaacgtgggtggtaccacggctaataatgtaatttagtcgtcccttggtcttttgaccaggggacgttttttattggaggaaaaactatggcaaaatttgatattttggaagatttaaaatggcgtggtgccattaatcaagaaactgatgaggaaggtttgagaaagtacttagcagaacatgacgattgggcattgtactgtggtactgacccaactggtgattcccttcatattggacaccttattccattcatgatcttgaagagattccaaatggcgggctaccatccagtaattttaattggtggtgttactggtgcgattggtgacccatcaggccgtaagactgaacgtactttacaaactgcggaacaagttaagcacaatgaagaaagcttaactaatcaaatgaagaagttatttggtactgaaaattttgaaattagaaacaatgctgaatggctaagcaagcttaacttgatcgacttcttgcgtgattatggcaagttattccaagttaacaatatgattaacaaggatgttgtagctagccgtcttgaaaatggtatttcatttactgaatttacttatcaaattttgcaagcaattgatttctaccacttgaataaagataatggtgttcaacttcaaattggtggtagtgatcaatggggtaacattactgctggtattgatttaatccataagcttgaaggcgcagatcgtccagcctttggtttaactattccattgatgcttaaggctgatggtactaagtttggtaaatctgctggtggtgctgtttggcttgatccagaaaagactagtccttatgaattttaccaattctggattaatcaagatgaccgtgatgtggttaaatacttgaagtacttcactttccttagccgtgaagaaatcgaagatttagctgaaaagactgagaaagaaccttggaaacgtgctgcacaaaagaagctggctgaagaagttaccaagtttgttcatggcgaagcaggtcttgaagaagctaaaatgattactgatgccttgttctcgggcaatatcaagaacttatcagttgctcaaattgaacaaggcttgaagaatgctccaagtgcggaagctggcaatgaaaagaagaatattgttgatttcttagttgacactaagattgaaccttctaaacgtcaagctcgtgaagatgtaaagaatggtgccatttatgttaatggcgatcgtgagcaaagtactgatttcgaagttgatccatcaagtgactttgatggtaagtacgttattattcgtaaaggaaagagaaagtatactttagttacaattaaataattaaatatatgattttaacattttatatataaaaatagagggattttttcctctatttttttagctaataatcggagatatttactaccaactaatatttgtaaaagataaagataatgatttgtgtaaaataatattttacttcttaaattgttattttattttctaaaatcaattgctacaatctatttattaagttattcacaaattcacattattactatacaatttgttatttcaagtgtaataccaatataaaatagctgcgtataccttttgcaaatgctgatgcaaagcactctattaaaaactgactcttaataaaaatatgtgaaaagcagcactatctgctttacttctaatcaaacagtgttatagtaatagtgtaaagagaaagtaagtaaatagaaagaggttattaaaatgttagaatctaagaaagctattaagattatttcaagtttggtaatcggtttgagtttaggctgtgttcttactcctattgctcaagctacttcatttactgctcctaaattgggtactgcaacacaagctccaaccaatcctgctattaaaaagggtgataagatctttgttgttattaaagacaccaaaaatcaaaaagtagctgtttacaataaaaatgctgaaaaaactagcaaaaaagttgcaatgggttctacttataccgcaaaagacgttaagaaggttaataaaaagaagattgttagaatcaacaagagtcaatggttgaatactaaagacgtcgttaagaactaaataaaagcaaatttaataaccgttttgaatacttattttctaaaaatacttggagagaataaataaggacgaggatgttcaaatgaatgtcttcgccttttttggtataatgaagacgccgctttagctcaataggtagagcaccgccgtggtaaggaggaggtccccagttcaaacctgggaagcggcttagttgttgtttttggcaagaaaggaaaaattttatgaagcatgaacttacaatgaatgaaattgctaaatttcaaaaagaatatgagcaaaaaccacaaaatcgggttgcggaattggctgttgttaataatggtgtggctaaggctagtttggattcagaaaaggttaggaaattgaaccgcactttttcaattgaaatcccaactgataatgttactgatcaaaagcaatcgggtcgctgctggctatttgcggccttgaatacattgcgtcatggttttgctaagaagtataatgctaaaaactttactttttcacaaaattatttattcttctgggatcgaattgaacgagcaaatattttctttgataatattttgaataccgcagatcgtccacttagtgacagaacagtgcatacttatatgcagggacctgatactgatggtggccaatgggctatggctgtttctttgattaggaagtacggcttagtgccaacctatgctcaagatgaaagtttcactgccaacaatactgctttcttcaatcgtattttgaataataagttgcgagaagatggacttgtgttgcgtaagttagctcaagcaggtaaaaatgatgaaattgaagctaaacgtcaagaatttttgagtgaggtttaccgtatggcagtaattgctttcggtcaaccagtacaaaaatttgaccttgagtttaaggatgatgaaggtaagtatcattttgatggtgatcttactccacttgatttctttcacgactactttactgatgacttggatgactatattgttttgttcaatgcaccagatcatgaatttgataagctgtatgctttgccatttgaagacaatgtagagggcggaagtccagttcatttcttaaacactaaaattgaaaatcttaaagaagctgcgattaagcaacttgaagcaggcgaaactttttggtttggttgtgatgtaggtaaagatagcgatcgtcaaaagggaattttagctcataacctctatcaaactgatgctatttttaatattgaaactaagttaagcaaaaaagagagactggaaactggtgcttcgggttcaactcatgccatgacgatggttggtgtggatgttgttaatggaaagccacgtcaatggaaaattgaaaactcatggggaaacaaggtcggtgaaaaaggctactttgtgatggatgataactggtttgatgaatatctcttcaaagtagttgttaaaaaacaatatgtaccggaaaaactggttaagatttgggaaggcaaagcaacgccggtaaaagcatgggactcaatggcataatggaaattaaacaagttatcgattttactcaaacacacttaaagaatgaaaaaacgggtcatgatttttatcatggcgaacgtgtagctaatttggctagtcaaatgtatttagcagatcatgctgatgctcatgaagatagccgggtagttgctattattaaaacagcgggttatttgcatgacacgattgatgaaaaaatatgtgctgacccacaaaaggtaattgatgaaattaaagttttattgccgcaagtagggtttaatgaactggaggcatgggatattttattcaccattcaacacatgtcattttcagctaatattgagcatcactatcatttgcctttatctggacaatatgtgcaagatgctgatcgtctagaaagtttgggtgcgattggaattgcccgtgcctttacgtatggtggtaaacatggcaataagatttacgatccagagattaagccagccgttttaactagtcatgatcaatatcgtaaccatgtcgaaaccacaatcaaccacttttatgagaaactttttcatttagaagatttaatgaatactcctgctgccaaaaaagaagcggaaagacgaactgcatacatgcgcgactttgtacgtgaatttatgcaagaatggaatgtttagaataatttaattttgaataagccttgatacatcagcattgaggcttattttttaaataaattaaaaataatattaaaaaaaacttgcaaagcaaaaaatatttagctatacttataaacaacttaaagagttctattaattttctcataaacgaggggagcaataatatgaagtttaccaagttattcgctgcaggagcaaccgttttgattgctggctcaacattagcagcatgtggtagtaattctaattcgtcaagttcatcagctaagaaaacaattaattggatggattcggctgaaattccaacgatggacatttctaaggcaacagacgttaccagttttaaccaattgggtaacgttgaagaaggtttataccgtttaggtaagaattctaaagttgagaatgctttggcaacagataccaaggtgtcaaaagatggtaagacctggactttcaccttgcgtgattctaagtggtctaatggtgataagttaacggctaaagactttgtttactcatggcgcagaaccgttaatccaaagacggcttcacaatatgcttacctcttcgaaggaattcataatgccactcagatttctgcaggtaaggcaccagttaatagtttgggagtaaaggctgaaggtgataataagttagttgttaccttagacaaacgaattccatactttaaattattgatgggattcccattgttcttcccacaaaaccaaaaggtggttgaagctaatggctctaagtatggtacttcatctaagactacagccttcaacggaccttttgtacaaaagggctggactggttctaacctttcttggaagcttgtgaaaaacaagaattactgggacaagaagaatgttaagcttgatgctattaattacagcgtgcaaaagacaccatcaacagcttacaacttgtaccaatcaaataagcttgatgctactattttagattcacaacaaactaagaacttaaaacatcaaaagggttacactttgcgtgatactgcagcaaccttctatttgcaatttaaccaaaagaagaagattttccaaaatgctgacttgcgtagagcaatctcaatgtcaatcaatagaaaggcactgggaagtgctttaggtggtgctaataccccagcaaccagtttaacttcaaagggtgtagttaaccatgatggtaaggactggtcagaagttgttggtgataagaagaacgccgcatataacccaactgaagctaagaaactttacaagaaggctttgaaggaattaggcgttaagaacgtttcatttacaatcctgtctgatgatactgattcaggtcaaaagacgactgaaacacttcaaagtcaattagaagaaaacttgaagggtatgaaggtttcagtagctaacgtaccattcaagactcgtttgaaccgttcaactagtggtaacttcgatgttgttgtttcaggttggtcagctgactttgccgatccaatttcattcgttgacttgtttactagcaagaatgcacaaaataacggtaagtggagtaactcccaatacgacaagttgatcgctgattctaagactacagcagatacaactaagcgttgggatgaccttgaaaaagcagaaaagatcttgcttagcgatgaaggaatcgccccactttactacaagactgaagcttggttagttcgtccagacattaagggcattgtctacaatggcgctggcttaaactacaacttcaagaatacttatgtagcaaattaattaaaaaatcaggaggacatagtaatgattattatttcagcaattattattttacaaacaagacataaaaataatctctcttcacttgtaattgcgtaataatagtctagctatgatttgatgaatagatagaaggagcaaccatgtgaaggttgctcctttttgtaataaaaaagaatgagggtcaaaatgaaaaagtggaaaaagtattttagtgcaagtttattaaccgtcgtatcagctgcaactttggcagcctgttcaaataaaagttcgtcatctggtaccaagcaaaccttgaattggatgactaaatcagaattacaaactttagatttgtccaaggtgactgatgcaactagtttagatcaaattaataattcgatggaaggactctatcgtttaggtaaaaattccaaggtggaaaatgctttggcaactaagactgaggtatcaaaggatggtaaagtgtggcattttactttgagaaagaatgccaaatggtctaatggtgatccagttactgctaaagatttcgtctattcatggcgtaggactgttgatccaaagactgcctcacaatatgcttatcttttctcaggagtaaagaatgcggatgatgtagtagcaggaaagaagaaggttgaaacactcggtgttaaagcagatgataaccaacatttaaccgttactttggatagaagaattccatactttaagctattgatgggcttcggggttttcttccctcaaaatgaacatgccgttgaaaagtatggcaaaaattatggtacctcatctaaaacaatggtttataacggaccatttgtatcaaaaggctggaccggttcaaacttgtcttggaagctagttaaaaataaagattactgggacaaaggcaaggtaaaactaagtaagattaattacagcgtgcaaaagacaccatcaactgactataacttgtatcaatctggaaaattagatgtagcattattggcaccacaagctacaaaacaattgaagaaccagagtggttatacaattagaccagcttcttcaacacaatatttacaattaaacgaaaagaacaagcttttccaaaatactgacttccgccgtgcactttcattatcggttaatcgtaaggcattagcttcagctgtaggtggtgctaacaagccagtcactaccttttcaccaaatagtatgactgaagtaaatggcaaagattatactgaattagtcaaaactgctgaaactgataagttaatgacatataaccctactttagctaaaagttattggaagaaagcacaaaaggctttaggacagagcaaagttaacttcactttgctaacctatgacgatgatgatgccaaaaaagcaggtgaatacttgcaaagtactattgagtcaaacttgaaaggcgttaatgtcagagtaaatagtttacctaaaaagactgccttagttcgtggtcaaaatggtaactttgatgctttactgatgggttggcaagctgactttactgatccaatctcattccttgacttgaacacctcaaatgcttcatacaactggggcaagtgggctaataaggaatatgataagtatgtagcagcttctaaaactactggaaacgaaaatactcgttttgaagacttagctaaggctgaacgtgtattgttaactgagcaaggtgtagtaccactttaccagccagcagaagcttggatggttcgtccaactgtcaagggcgttgtatataatggtgctggagctaactataacttcaaatatgcttatgttgaaaagtagactaaaatcctaaatatctaaataatagaacttataacaataaacaactcctctatgtaattaaaaagcagaccgaaaaaatcggtctgctttttgattttcgcttgaaaaaagcaagttaggctagtaaagtaaaactaataattttttgaatgagaaaaggagagcttaaatgtcaaattgggatacaaaattcgctaaaaaaggtttaacgtttgatgatgttttattaattccagcagaaagtcatgttttgccaaacgaagttgatttgagtacgactttggcggataacattaaattaaatattccattgatcagtgcagggatggatactgtaactgaaggtgcaatggcaattgcaatggctctccaaggtgggctaggcgttgtgcacaagaatatgtcaattcaagcgcaagctggtgaagtagccaacgtaaagagcgtagttgtgccaactagtgctgcaaaggccgcaactgatgatcaaaaccatctgctctgtgctgcagcagttggtgtaaccagtgatacttttgaaagagcagaagcattgcttgaagctggtgctgatgcgatcgttatcgatactgctcatggtcactcagctggggtattgcgcaagatcaaagaaatccgcgatcattttccagaagcaactttgattgctggtaatgttgcgactggggatgcaactagagcactgtttgatgctggtgttgatgtcgtcaaagttggtattggccctggatcaatttgtactactagagttgttgctggtgttggtgtgccacaaatcacggctatttatgatgctgctacagctgcacgtgaatatcacaagccaatcattgcagatggtggaattaaatattcaggtgatgttgttaaagctttagcagcgggtggcaatgctgtcatgcttggctcaatgctatcaggtactactgaagcacctggcgaaatttttgaagataatggcaagaagtataagcgctatcgcggaatggggtctgttggtgcgatggcccaagcacacggttcaagtgaccgttacttccaaggtggcgtaaacgaagctaataaacttgttccagaaggtgttgaagctcgagtagaatataagggcgatgtttctgatgtagtctttcaaattgatggtggtctccgttcaggtatgggatattgtggtgctgcaaatattccggaattaattgataaagctcaatttgttcaaatcactaatgcaggtttacgtgaatcacatccacatgatgttcaaatgaccaaagctgctccaaactataagtaaagcaaaatagatataataaaagttaaaaataagagagaaagcaaaatttctctcttatttttttaattttttggacattttcactagatatatttatttcttttggtataattaaaacagcattaaaaagtaaatgaaagcataaaataaaatgagggagcaattaatatggctagatacctattaaaacgtatattttatatgatcctcactttgcttatcgtggctacggtaacttttttcttaatgaaattgatgccgggttcaccttatgctaatgaagcaaagatgacgctaactcagcggcaaattatggatcaacagtatggtttaaataaacctatctggcaacaatatttgatttatattgcggggatgcttcacggtgattttgggacatccttccaatatagtaaccaaccggtagcttcattaattggggcgcgtttgggtgcgtcagtacaattaggtttacaagcattaattttgggagttgtccttggtgtaatcgctggggcaattgctgctatgagacagggtacttgggttgactcaactgctactgtaatttctattttgggtaaatcagttcctaactttgttttagcagttttgcttcaatactacatcggtttaaagctaggttggttcccaattgctggttgggggcaattttctcaaacgattatgccaacgattgctttggcagttggaccatttgcggaaacagctcggtttatccgaaccagtatggttgataccttaagtagtgactatattgagttaggtaaggccaagggcttaagtagaatggaagtcattagaaaacatgcaatgcgtaattcaatgattccattagtaactctgattggtccttatgctgtagccttgatgactggttcaatggttattgaaaatatctttaacgttcctgggattggtgaacaatttgttaagtcgattttgactaacgactatccaacaatcatgggaattacgatggtttactgtattggattagtagtaattctgttgattactgatattgtttatggattaattgatccaagaattagattagatgaaagcgaggcctagaagacaatatgactgaagaaaaattaaaccttactgcagatgcctttgaacccttaccaaaagatgaagcacaggataacgaaaacattgcaggtccatctttatcgtttgcacaaaatgtttggcttcgcttcaagcagagaaaagcagctattatttctgcaattattgttattttgatgattgtagtagcttttggttcaaccccattcatcaataaatctactttagttaaatcgcacccacaatatgccaatttgcctgctaaagtgccaggaatgagcgcaattaacgggttgaacggtaagattaagcaaaatggcaagtgggttgatgcttatgcccagaatggcgtgcctaaagataagtattttatcgcaggtacagattatttaggcagatctttgggacaaagaattatctatggtacaaagatttcattgatcgtcgctttagttgcagctttctttgatttaactatcggagtcgcgtacggaatagtgtccggatggaaaggcgggggagtcgataacgtgatgcagcggataatcgaaattatttcctccgtacccaatttgatcattgtagttttgatgttggtggtattaaaaccaggtattaagtcaattatcttggcaattgctatttcaagttggacgacaatggcgcggcaggtccgggctgaaacgttgagtttgaagaatgaagaatatgttttggcagctagatcattaggtgaatcaccttggaaaattgcttggaaacacttagtgcctaacctttcaagtatcatcattattcaaacgatgtatactattccaactgctatcttcttcgaagccttcttaagtttcatcggaatcggtatttcagccccagaaacttcactaggtgtacttttgaacgaaggacaaaagaattttcaattcttgccatatcagatgtggtatccagcaatcgtattgtgtgtgttgatgattgcctttaacttattaggtgatggtttgcgtgatgccttcgatccacggggacaaagatagaaaggattaacctaaatgccagaagaaagagttttagatgttaaaaatttaaaaattgatttccacacttatgctggtgaggttaaagctattcgtaacgtttcctttcacctaaataagggagagacgctcgcaattgtaggagaatcaggttcaggtaagtcggttactaccagaagtattatcggtctgttagcacgaaatgctcagattgaagacggtgagattgatttccacggcaaaaatttgctagagttatctgaaaaagaaatgcaaaaaattcgtggtaacgaaatttcgatgattttccaggatccaatgacttcgcttgacccaactatgaagattgggcagcaaattgcggagccattaatcaaacataagggtgcctctaagaaagaagcttgggctaaagccttggaaatgatgaaggccgtgggaatcccaaatgcagaagaacgaattaatcaatatcctcaccagttttcaggtgggatgagacaaagaatcgtaattgcgattgctttaatttgtgagccagagattttgctggctgatgaaccaactacagctctagacgtgactgtccaagctgaaatcttggacttgatgaaagacttgcaaaagcgggttaagacctcaattattttcattacgcacgacttgggcgtggtggccggtatggcagatagagtagctgtaatgtacgctggtgaattcttagaattcggtggtgttgatgaaattttttatgatccacagcatccatatacttggggcttaatcaattcaatgcctactttaaacagtgatactttggagtcgattccaggtacgcctcctaacttgcttgatccgcccaagggtgatccttttgcaccaagaaataagtatgccatgaagattgatgtggaaagaaagccaccatttttcaaggtaactgatactcactatgctgcaacctggcttttagcaccaggtgcacctaaagtggaaccaccagctgaaattacacgtcgctggaaaaaatataacttgatgaaacaagaagataaactgccagaggttaactagtcgcggtaaaggagatttttatgccagaaaaaaagaaaattttggaagtaaaacatctaaaacaatactttaaaaatggtcgtaatgtcaccaaggctgttgacgatgtaagctttaatatctatgaaggtgaaactttcggcttggtaggtgaatctggttctggtaagacaactactgggcgctcaattttgcaattgtataagccaactagtggcgaagtgatttttgaaggcaaaaatgtagcagatttaaaaagtcgtgcagacaaactagcttttacacgggatgcacaaatgatctttcaagatccttatgcttcacttaatcctagaatgactgttgaggacattattgctgaaggattagatattcaccatttggttaaaaataaagatgaacgaactgagagagtagaggaattattggaaactgttggcttaaatgcaagtcatgctagccgttttccacatgaattctcaggtggtcagcgtcaaagaatcgggattgctcgcgccttagccgtagagcccaaatttattgttgcagacgaacctatttcagctctagacgtatcaattcaagctcaagtagttaacttgatgattgaattacagaaaaagcgtggtttaacttacttgttcattgcccacgatttatcaatggttaagtttatttctgaccgaattggtgtaatgcactacggtaaactactggaagtaggtccagccgatgacgtctatgatcgaccacttcatgattacacgaagagtttgatttctgcagtgccaattcctgatccagaagttgagcggagccggacaaggattccttatgacgctcaaaaagaagaaatggacggaaagcaacgctcaatgcatgaaattcgtccaggacacttcgtacgctgctctgacgatgaagtcaagcattacgaagaagtagcggcaagctacgaaaattagataccaaatctaatgcaactctctctatattaatattatatttatgctaaaaaggcgatccgatatggatcgcctttttatatgatcattgctcgttaagctaatgaatcccatgctggtaggtcagtgattggaccttcagcgagcttcttttggttttcagttaagtacttcttgtggactacaacttcgtaaacatagtccttaaaccattcattattcatgacgtagaagcctttaacaccagatttatcgccccatgagttctcaactttccattgacgaacttcgccgttgtcttcatcaacaccaactaaagtcatggcatgtgacacttgaccgacgccggtctttaatctgtctgctttagacattttaaggtcaacgccgaataagtcatctaacttgtacaaattagtgtcaaggtaaccagttttacggtccatttgacgtaaaacatcgttaccaaaccaaacagcttcgccgtcttttaattgagcgatagcagcgctggacaagtattccattggtacattcaaaatcttgattctcagtgagccttcaatgttgtcttcagctggtagaccataaagcttgttatagtcatggtctggagcattggttaaaacaacatagtcatcaaaatcaacgtcgcccatgtacttgtgtaaaaactcaagtggagttaggttcttttctaaatgatatttcttgtcgtcatcacgatattcaagatcgaaagtcttaggtggttcacctactgcgatagcagtcatttggtaaacttcgcttaaaaatttttcgcgaacctttttaatttcatcatctttgccgtattgcttcaagtggcgcaatactaaagcatccttctttaacttatcgcctaaagcagtcgcaaaaccagtagtatcattggtgttaaaagtttctggcattgcatatgaaggaacaacaccatatttttcaactaaagcggcagccatttggaattgtccaccatcactaccagcaaagtctaagtcagccttaacttgacgtgaatcaagtggcatgtcagcactgtctaagattctgttgtagaacatgttagcacgttcgatcttatcccagaagaagttgtaagcttgtgagaaggtgaagtccttagccttatatttcttaccaaaagcgtggcgcaaaacgttcaaagtcgcaaacagccagcaacgaccagaatgtttttggttagtgacattatttgtatcaagttcagttgaaaagacgcgggttaattgtccttgaacacgatcattataagatgcttcaagtacaccactgcgttgagctgcacgagcaacgactttattttcaggttttttattaaattcggcagagaacttttctagttcctgcacagttaattcatgagccataaaaaatctccttttcattttataatttttttctcaatttaattctattttaaagcaaaacaaaagcgggttcaatcagaactcgcttgagagaattattaatccgtcaacttattagatttcttgcctatatctaataaattaatcaatttggatagaattgccatcattgccagcagtttcctttggcaaagtgatggtcaatacaccattatcatactttgcatgaatctcacttgcaactacatttggtaatctatagcttctagaaatactgccctcacttctttccttatgaatgatatttctatttttatcgctagtgtccttaaatgattttcttgtgccgctgacatttaacgtaccgtcattatagttaacgttgatatcctgcttatccatgccaggcatgtcaatcttaactagatagtccttatcagtttctgcaacatcagattgcataatgttttcaatttcattatcgtcaaagaagtttcttggaaaaccaaaccaatcattcattgtatccatcatgtcgttgcgccgattcatcatattgtttgccataaataaaacttcctttcatttttgtatttgcttaattagaatataaggaaaagatcaactcatttcttgatctcttttctccttacactgtttattgtagtcgctttttatagaaatgacacaaattagcactcaaaaatatatagtgctaattttagactgataacgctgctacaataacattctgagattgtagataattattacgtatagaaaaataaagaaagtttgtgaaatagaaatggtatattttcagaaaatgactccagaaggctatcaacaaattgaggatgaaattgctcgattaaaaaaagatcggccacgtagaattaaaattttgcaggctgcacgagctttaggtgatctttcggaaaatactgaatatactgaagcaaaacgtgatctaggtcacttacaaagtcgtctgcgttacctaggcaaacaattaaagtatgccgaaattgttaaagctgaagatgatggtaaggttgatctaggaaagaccgttgtgcttaagtttgatgacgatgatgaaacagaagaatacaaagtagttgggcgaatggaagcggatcttgctgctggcaaggtttcttttgattctccattgggtcaagcaatcatgaaaaaggaggctggtacaacagcaacggtggctgcaccagcaggtgaatatcaagtaacgattgtggaagttaaataagttgagaactataataaactgtctttttctggtataatatgggttttgtaggatacaattcagagtaggagtgaagaatttgaatacgccacaatcaagagagggtaatgtgatccgctatgccgtttatttagctggctatgtcgctgtgtttgcagtagtaaagctagttactagaaaatctccggttcatatttgggatttgattttattcggcttagttgcagccatgattctgttgttttatgtttatcgtttcaatcgagagcaacgcttttttgcccgtgattttaaacttccatggttgggcagtttgtcaactgttgttctattaacattagtgattacagttacacagatttcgatttcatacttacaatcatatggcaggattagtcattatgatttccaattgatatatgccaaaagtgaatcagttaacatgttttggtttttaatcgttgtccaaggaattgtattaccaatcctacaagaatttttggcgactggctttttgttcaattatgcttttcggcgaaatactaagcaagttgcaattatggggatcattgtttcaggtctgatttatagcttactgaactttcaaaattcagtagtactctttattattgatgcaatttatggcatggtgtttgcttggagctatatgtacacacaaacattattgatgccaatttacttagctgtagttagtggcgtacttacagtgattatgatttaaaaacaaaaggatgagaaaaattctcatcctttttttatacaaaaagcggatagcgtgaatcgaacccgcatctacagcttgggaagctgtcgttctaccatttaactatacccgcaatatgtttttattttagcattttttctatttgaagatcaacacttttacgatcaattaagctggtaaaattttgaaaaagccagcggcgtagttcgttgggcataacaactagaggcattctattatggattggcgccatatctttgttaggcgcggtagtaaccattgaaaaataatcctgatcataaatacctgcaattaaggtaagtggttgattagtgcggaaggcgtagctatcatggtatttacgaccgttttcagcaatatgggtagttttagcatattcaaagaatttttcggttaagattaagcaacgttgcttggcaaaggatttgtcccacattgaaggcgctgaatcataaaatcgctcaattctagcgttaaataatggcttttttggatcaacgggacttggatagccccattttttgttgtttaattgcaattgaccattttgataaagcaaaacaggtgctacttggttaggaaaaatatcttgtgcttgaatgtcaaaatttggtgtaactaagggcaggtcaagatcgcttttgagatattgttgaatttgttttaaattaggtaaacgaaactggttgcacatacgcatttcctttctttagggctagtttaatcatagcctattttttgttaaaattaggtaattaaacaattaatattaataaaaaaataaacttaaaaattagaaaagagcaaaaagatggcgaaagaaattttattaactggtgaccgtcctactggtaagctgcacattggtcactatatcggttcattaaagaatagagtaaaattacaaaattcaggtaaatatgatccatatattatgattgcggatacacaggctttgaccgacaatgctcgtaatccggaaaaaattcgcaatagtttgatccaagtagctttagattacttagctgttggtattgatccagctaaatcaactatttatgttcaatcacaaattcctgctctatttgaattgactgcttactacatggatttagtaactgtggctcggcttgaaagaaatccaactgttaagacagaaattaagcaaaaagatttcaaagactctattccaattggctttttaaactatccagtttctcaagctgctgatatcaccgcttttaaagcaaccgttattcctgttggagatgaccaggaaccaatgttggaacaaacacgtgaaatcgttaggacttttaaccgtgtttataattgtgatgttttggttgaacctaaaggttatttcccacctaaaggtcaaggacgtttgccaggacttgatggtaatgcgaagatgtcgaagtcacttggcaatgcgatttatcttgctgatgatgcaaagacagttcaaaagaaagttatgtcaatgtacacggatcctaaccatattcacgttgaagaccctggtaaggttgaaggtaacactgtctttacatatcttgatgtcttcgatccagataaggacaaggtggcagaacttaaggcagaataccaaaagggtggcttaggtgacgttaagattaagcgttacttaaacaaggtccttgaagcagagcttgcaccaattcgtgaacgtcgcgaaaagtttgctcaagatgaagatgcggtttatgaaatgcttctggaaggttcaaaaaaggctaataaagtggctaatgcaacacttgaacaagtccgtgacgcaattggtttgaactatttcaagaatagataaggctgaggtaaagttatgcacgatcgaattccttggaaacaatattttatgatgcaggcgctagtaattgcgcaacgctctacttgtaatcgcgcattagttggtagcgtcttagtaaaaaataatcggattattggcactggttataatggttccgtttcaggacaaccgcattgtgacgatgtgggtcatcaaatggttgatggtcactgcgttagaactattcattcagaaatgaatgcgatcattcagtgtgctaagtttggtgtttctacagaaaatactgagatttatgtgacacattttccttgctataattgctgcagatccttgttgcaggcaggcgtgaaaaaaattaactattattttgactatcgcgataatccattggcgatgcaactacttcatgatagcggggtgccttatgaacagattaagattaatcgcaaatacgtggaaagcttggcccataaacttgaagaagacgagaattaatttaatttggttaatgggactagtaactgtatttttaataacgacaggatttgtccagccaaatattgaagatcatgctcatattttagataaagaaactcgcactttgattacggaaaaaaataatcgctattttcagactaaagaacaaccgcaaattgtcgttataacggttaaaaggctgaataagttaacacctaagatgctagatcattctaagcgaacggtctttattgtggtaggacagaaaggtaaaaagcgtaatgtgcaaatttattcaactaaagatttgcatagtgccttcaccgaggtcgctcggggcaatatcttgcgtgctgaagtagataaattgcgtagtcaaaataatgcaacttttaacaagggaattcgcttcgtctttcgggcatgtgcgactagagttgatcaacaatatcaatatgcacttgataaatatgatttgacgcaagcagaacaaaataaagtcgcgcgtccacatagtgtagctttaccaatcgcactggcactggcatttttaattacgggaattacttatttcttgcgtagatttagtcatcgtgatccaatttctaagaaatagtcggcttgacttatttgcattttgtccttacactttttatagacataattagcgaaaaactgttaggtgagactcctacgtgaacacacgctatcgcccagaaacatccagagatgccaacgggttaaataggtgtcgtcgacttaaggcgagatccagatagctagcatgtgcttacgtcacgtagtgttaaaactgaacgacgagtatgacagagccttgtttggcaaaagtcacctgcagagttacaggtggcttttttgttttgcttgtcccaattaaagaagggagcaaataatgttaaaagcagctagcaagaagcgatcgaatatagacattcaaaggattcaacggattgcgcgtgagtcacgtagcgagacgctggcgcgtttacaggcgagtgctgaagggctttcgactaataaggctgaagaaaacagaagagaatatggcaaaaacgaaatcattactaatagcaattcctctaaatggcgcttattatgggaatcaatcgctacgccatttacgttggttttattagtattaactttattaaccctgtttactagctatattttggtgccacaaggagataatgacttaattactacgatagtgatgatcgtgatgttgattatctcggttctcgtcaattttatccaaaaaatcagaattgctaaggtaactgatcaattactcaatatggtatcagttacaacgaatatccggcgtgatggcaaaaatgtggaattgccaacagatgaagtagtggttggtgatgtaattaacttgtcggctggtgatatgattccagcggatatgaagttgttaactagcaaagatcttttttgctcatcaagctatttagatggggatcctgagccggcagaaaagatggctaatgtagtaattaagccgagtatggctaatgattatttgaactaccctaatattctatatgagggaacaactattgtttcaggctctggcaccgggattgtttttgcaattggcaatcacactgtttttggcaaagcagttcaggctatttcccgtaaaaaagtaaaaactaccctgtttgaccgggaaatgaagcaattagctaaaatattgattatcgcgacagcaattgtgattccgcttttgtttgtgattaatggcctgactaaggggaattgggggggggaaagcttaattttcgctttgacagcggcagttggcttaacaccagaagtgttgccgattattgttaattccaatttaacacggggcgcacgggaaatatcccaaaatggtgctgtcgttaagcaaatgaatgctattcaaaatttgggctcaactgatgtgttctgtatcgataaaaccgggactttgacacaaaatcaagtggttttagagcgtcactatgatttagatatgcaagaaaccccacagattttgaagttttcatatttgaatgcatattatcaaactggggtaaaagatttaatcgataaggcggtaattgatgccgcgggcgatgaactagatgtaaacgaaattcagcgtgattacaataaaattgacgaaattccctttgactacactcgaaaaagaatgagcgtggtagtggtagataacgatgaacaccacgggcagcacttattagtaactaaaggtgccgctgaagggatgctggcaatttctaataaggttgaacttaatggaaaggttgaggatttaactactgcctggcgagaaaagatcttaaatcagattaatgaattaaacgatgacggtttacgggtacttttagtaggttataaattaaatcctgccccagtaggtgagttctctgctaaagatgaacatgatttaaccattattggctatttggcttatcttgatccgccaaaagaaacaactaaagaagcgctggaagatcttaaaaaagattatgttgatgtcaagatttttactggtgataacgaagcagttactcgtgctattgctttgcaggtgggattaaacgttgatactgtttatgacggcacccagatcgaagcggttagcccggaagagttgcgtgaaattgttgaaaaatgcgatatatttgtgcgaataaccccggaattaagagtaaaaattattaatgcactcaaagcaaacggtcatacagtcggttatatggggaatggcaataaagacgctttagcaatgaaggtagctgatgtgaccgtaacttcgaatacgtcagttgatattatcaaagagtcagccgatattatttttgagcaaaaagatttgcagctgttagaagaaatgattctaatgggccgaaaagtcttttcaaatacaatgaaatatattaagaccttcttggtaactaacgctggtagtgtaattgcgatggttgtttcatcgctgctcttgccatttttgcctcttttgccattgcaagttttaattttaaatttgctgtttagcataagttgtctggttattccctttgatagtgtttctaaaaactatgtcaaaaagccacaaaaatggtcgattaagagatggccgaagtttgtacttaattttggtccgattctagcaattattgattttatcgcaatgggcttgatgttttatgtgatttgtccatatttagtagggtctaattatcatcattgggtctttatgacactattttattcggggatttttgtggaatcgctttggacaagaattatggtgattcacactttgcgtgatgaacgttttccattctttaagcaacatgccacgccagtggtgttcttggtgaccattggtatggcaattattggtacaatgttgccttcatcaagtatcgcgccaagtttgggcctagctcaattgccgtttggttattggggcatagtcttcttgctagaagtaatctacattttactgacgactttggttaagcacttatatttaaaaaaagaaaaattctgatttgaattaaaaggaattgctggttttagcccaattcctttttttgcatgttaaaataaaatagatattttagacgattaaaggagtttgattaatcaatggctgataaagatactttttatattacaaccccaatttactatccatctggtcgcttaacgatcggtaatgcttatactactattgcagctgatacaatggctcgttacaagcgcagtcaaggctacgatactttctttttaactggtactgatgaacacggcttaaagattgaacaaaaagctgaagcacaaggaattaagccacaagagttcgtcgacaagatggcggcttcttacaagaaattatggaagagtctcaatatttcttacgataagtttattagaacaactgacaaagagcacgtagctgccgtacaaaagatttttgaaaaattattagcaaaaggtgacatctacctaggcgaatatactggctggtactcagttgaagatgaagaatactttactgaatcacaacttgctgaagtttacaaagatgatgatggtaatgtaatcggcggtaaggctccaagtggtcatgaagtacgtttggttaaggaaccatcctacttcttcaagatgagcaagtatgctgaccgtttggtggaatactacaaggaacatcctgaatttattttgcctcattcacgtgaaaaggaaatgcttaataacttcattaagccaggtttggaagatttatcagttacccggactactgttaactggggaattcctgttccaagtgatcctaaacacgtggtttacgtttggatcgatgcactttcaaactatattaccgctttgggctatggttcagacgatgattcattgtttaagaaatattggcctgcagacgttcacttggtaggtaaggaaattgttcgtttccacactatttattggccaattatgttaatggctcttgatttgccacttcctaagcacattatcggccatggttgggtattaatgaaaaatggcaagatgtctaagtcaaagggaaatgccgtttatccagaatcattgactagtcgttatggtgttgatccacttcgctattacttgatgcgtgctcttccatttggcgatgacggtatttttacaccagaagactttgttgaaagaattaattatgacttggccaacgatttgggtaacttacttaacagaaccgtgtcaatgattaatcaatatcaagctggtcatgttgatgcagttcctgttgctcaagctgaatttggcaaagacttgcaagatacagctgctagtgtcattaatgattatcgcgaaaatatggattcacttcacttttcaaaggcattagacaatatttggaagttggtttctcgtgctaacaagtatattgatgaaactactccatgggctttgaacaaagaaggtaaaaaggaagaacttagcaaggtcatgagcaacttggctgaaagcttgcgtttaattgctattatgattgaaccagtaatgaccgaaactgcaccaattatgttcaagcaacttggtttaaattgggacaatgaagacgctaagcatttggcctttggtgactttgattgggatgttaaagtaattgaaaaaccacaaccaattttcccaagacttaagatggacgaagaagttaagtacatcaaggatgaaatggctaaagctaagccaaagaagaccactagaagtgaacaaaagaagggtgacgaaatcaccattgacgattttgacaaggttaagatccaagtaggccaaattttgtcagttgaaccagttaaaggctcaagcaagttgctcatgttcaagctggactttggtaatggcaaggaaacccaaattttgagtggtatccgcaagttttatccagatgcaagtgagctattagacaaaaaggttttagctgttactaacttaaagccacgtaagatgctgggtcaccttagtgaagggatgctcttatcaagtgaaaagcatggcaaaattaagttagctcttgttggtgatgaacatgcagttggggctgaactcggctaatggagatcattgataatcatactcatttgaatgacgagccgtttcgcggcaaggaacaatattatttagaacgagcaaaagcacttgatgtaaccaaggttatttgtgcggggcaagatcctgactttaatcaaagagcggttgacttagcacaaaggtttgataatgtctatgcgatggtcggttactgtcccgatgtggctaaagactatgatcaacaggctgaagataaactaattgaacaattgaagcagcctaaggtagttgcaatgggcgaaatcgggctagattattattgggatgaatcgccgcgcgacgtacagcgtaatgtttttgcgcggcaaattgaagtagcacatgacttgaagatgccggttgatatccatactagggatgcatttggagattgttataacatcttaaaaaatagcaatctggaatatggtgctgttttgcatagttttaacggtggtgttgactggttaaataagtttttggatttgaatgtttacttttcatattcaggtgttgtttctttcactaaggctacggaagtacacgagagtgcaaaagctgcgccacttgaccgaattttagttgaaaccgacgcgccatatttaacgcctgagccatatcgtggtcatcaaaatgaaactggctacgtacgttatgtggcagaagcaattgctaagttgaaggatattccactagagaaagtggcggatgctacttataagaacacagtgagagtttatgggcttaaataaaaagaattttgatgcggtaatcgttgttgaggggaaagacgataccatccgtttaaaacaatttttcccaggaatcgagacaattgagactaatggatcagccgtttcagatgaagtattgaagcaaatccaaaaattaagtgagagtcggcaaattattgtctttactgatcctgactttaatggcgaaagaatccggcgcattgtaactaaagctgttcctgatgcaaagcaagcttttattacccgtaaggaaggcgaacctcataaaaaggggagtctaggtgtagaacatgcttcaaaagaagcacttgagcatgcactaagtgatttgcatgaggttgaaccgcaaaaaagtgatttaactccagcaatttatcggcaattaggtttagctggtggtagcggctcacgaaaattacgtgaacaagtaggcattaaattacgagttggctatggcaattccaagcagttttataatcgcttgcatacttttggcgtttcattagctgaattaaaggcagctgtcaaggaggtagaaaatgacaaataatattccaattggctctccagttagaacacaagcaattgttaaccgttactttgtcaaagctaaaaagaacttagggcaaaatttcttagttgatcagactgctattttaggtattgttgaagctgctgggataaaaaaagatgatcaagtcattgaaattggaccaggtattggctctttgactgagcaactactgttggcaggcgctaaagtttttgcttatgaagttgatgatagcttacctacgattttacagaatgaactgcctaagaaaattgatgatcagcctttggctagtcgctttaagattttgcttaaggatgtattaaaggctaattttaaagaagatattggtgacttttttgacttcactaaaccgatcaaagttgtagccaatttaccatactacattacgacaccgattatttttgctttagctgaatctgacttgcgctttactttgctgaccttgatgatgcaaaaagaagtggcagagcgattagaagctcaaccaggtagcaaggattatggcccattaacgatttctgttcaaacagaaatgaaagttaagcttgctttacaagtggggcgtaattcctttatgccacgacctaaagttgattctagtgtagttgttttgactccgctaaaagaaaagcctgctattgaagatcgcaagcactttattttggttgtgaaaatgtgcttttcacaaagaagaaagacactgaacaataacttaaagtcattattgccagataaaaccaaacgagatgaattgattacagaattaggtgtagaaccacgaattcggcctgaagacctaacaattgaacaattcattaagattgctaaatttattcctgcaaagtaatgcctaatattgaatttattatatatttgtgatattatttacataaaggagctgttgtttagtgccaacatcaattatcacaattaaacataagttggattctcacttaggtgatactttaacagtagtagctcaagcgggtcgtaagaaagttactaagagacggggaattctaagagagactttccctgcagtgtttgtggttgatttagaccaacatcaaaataattttaaacatgtttcttacagttataccgatttactaactaagaatattgcattagagtttgatgataaagctgaagaggctgaagcttaaacacaatttctgaaattgtcactagcatttatttaaaatgttagtgcttttttttgccctttagagtatattaattaagtataaaccaaacattagaaaggagatttcatgaaacgttcagaaagattggtggacatgaccaaatatttaatggagcgtccccatactttaattgcactatcattctttgctaagcgttacggcgctgctaagtcatctatttcagaagatttagctattttgaagcacactcttgccagcaatcaagatggtattttggagactgtagccggtgcagctggtggcgtgcgctatattccatttttaggtaaaaaacacgcggaagcatatttgtcagatttatcaactaggattgaggatccaagtagaattttagccggtggttttgtgtatctgtcagatattttaggcaatacgcaagatttacgtaaaattggtgaattagtagctactcattatgcttatgaagaaatcgatactgtcatgacagttgaaacaaaagggattgctttagcccaagcagttgctcgttttttagatgtaccatttgttacagctagaaagcgatcaaaggtaacagaaggtgctactgtttctgttaactatatttcttcatcgttgtctcgagtatcgaagatggaattaccgactcgtgctcttaaaaaagaagctaaagttttaattgtcgatgattttatgaagggtggcggtaccctaaccggaatggaagaattagttaaggaattcgatggtactattgccggcgtttgtgtactctgtgaagccgattttgacaaagaaaagctgattaagaactatctttcattagtaaaaattagtgaaattgatactgcccaaaagctgattgtagcagaacctggtaacttcttaactgaaactgattttgaccgtttctaaaatggtatactagaatcaagttttgattattaagaggttaatattaatggaaaaatatgtagttgttcttgccgcaggtaagggcacacgaatgaagtcaaagttgtacaaggttttacacaaagtttgtggtaaaaccatggttgagcatgttgttgatgcagctcaaggcgttagtcctgcagaaatcgttacaatcgttggtacaggtgctggcgatgtagaaaaagtactggcagacaagtctaagtttgctttccaagaaaagcaattaggtactggtgacgccgtaatgactgcgcgtgaagaattgggtgacaaagatggtgctactttagtagttactggtgatacaccacttttcacaactgatacatttaatgaactattcaagtatcatgcagaaaaaggcaatgctgcaactgtattgaccgcggaagctccaaatccatttggctatggtcgaattattcgtgatgatcaaggcaatgttttacgaattgtagaacaaaaagatggcaaaccagaagaattaaaagtaaaagaaatcaatactggtgtattttgctttgacaataaaaaattatttgaagcattgaagcacgttaataatgacaatgctcaaggtgaatattacttaactgatgttttagaaatcttgcgcaatagtggtgaacgcgttggtgcttacaagatgcctgactttagtgaaagccttggcgttaatgaccgtattgcattagctcaagctactaagactatgcaaagaagaattaatgaacagcatatgcgtgatggtgtttcatttatcgaccctgatactgcttatattgatgcagatgttaagattggcaacgacactgtaattgaaggtaatgttgtgattaaaggaaacaccgaaatcggtagtgattgctacattactagtggttcaagaatcgttgattctaagattggtaataatgtcactgttacttcttcaactgttgaagaagctgaaatggacgataatactgacatcggtcctaattcacaccttcgtcctaaggcaattattcgcaaaggtgcatatattggtaactttgtggaaattaagaaggctgagattggtgaaaatactaaagtaggtcacttgacttatgttggagacgctaccttaggtaaagacattaacattggctgtggtacgatcttctctaattacgatggtgtaaagaagttccatactaatgttggtgatcatgcctttattggcgctggctcaacattgattgctccaattaatgttgcagatcacgcctttattgcagctgataccactgttactaaggacgttaataaatatgacatggcaattggccgtggccgtcaagttaataagccagattattggcataagcttcctctttctcaagataaagaatgggattaagaataaggcactagtgtatcaagctagtgcttttttgttaagaattgctaaatacttattgcaaaataataattgagacctacaataaggtgtactaataataatttttacatgaggtaggtaatactatgaaattaagtcataagttagttatggtttcagcagctgttttgatgggtgttagcccagtattaggcatggcagaaaatactgtatctgttcaagctgctactaagagtactaatggcgtacataatacttacggtaaaaacagcaaagtcaaagtaactaagactatgaagtttgtcgaccgtaatggtaagaaaacttctaagactgctcctaagggtggtagctacactatttggaacgtcaagaatatcgacggtcaagtttactacagtattcaaactgatttgaagtactggattcctgcaactgcaactgaaggtacagtaacttataagtcaggcaatactacttatactttaaagagtgatggcaagaaggtaacaacttctacttcaactaagaaggctgttaagaagactaattcaaataaaaacactaaaaaagtagttaaagaatcaactaagaaaactgccactaagactactaaaaaaagcaactcagaaaagactactaagaaaacttcatcaaagaagacgccagtggctaaggcagttaagataactactaagaataaggcttacgtttacgacaagaatggtaagcgtgtaaaaaactatttaggcactagttacattggtaaaaagatcactgttaaaggtttaggtactaagaccattaatggtgttaaatattatgctttgcaaccaaatcattattacattaaagcttcagatgtaactgttaagtaataattgataggaaaaagacactttttcgtttctaaattggcaaaaaaatattttagatctacaatatataaatgaactttaagtttagtaagaatgaggtatttatcgatgaaattaagtcataaattagttatggtctcagcagctgcattgatgagtgttgctccacttttgggtactgcagaaaacgtcaacactgttcaagctgctcctaagaagactacttcaaagaaggcagcaagcaacaagatcactttggtacgtaatgcttatgtgtacgataagaatggtaagcgtcttgataagtacatgggcagtgcaaaatacactactattgctaaaggcgtaactgttacttcaactggcactaagactatcaatggtgtaaagtactacgatcttggtggtggtgcttatatcaaggctgttaacgtagatggtaaagctgcgtcatcaacttcatcactgtcaaagggtactaaggctaagtttgtttctaactcatacatttatgacaagaacggtaaacgtatcagcaagtaccaaggcaaatctaagtttgttaagggtgattcagtcactacttacggtattcaaaccattaacggtaagaagtattaccaacttgacaagaagggtactgcttttgtacgaactgttaacattgatggtaaaaccacttcaaaccaagaatcatctgtttcaaatgatgcagaatcaactaaaaaatatgactactcattaaagaagaatgcttatatttatgataagaatggtaagcgcatcaacaagtaccaaggcaagtctaagcttttaaagggtgccgcaattgatgtttatggcattgaaaccattaagggtaaggattactaccaacttgacaagaaaggcactgcttttgttaaggcaagtaatgtaactagaaccgttaaggcaacttcaattaccatgaagaagaatgcttatatctacaatggtaacggtgacaccaagaagaagacagttaagaagggtaagactgttaaagctactgaagcaagatacattggtactaagctttactacaagattggtgataatcaattcgttaaggctgctaatgtaggtaaaatttcaggcccagaactagaaccagttaacgaaccagatggtgctgctactgttgatactggtgataatactgtagatccaaacgtaaccaaggtaactacgattaatgttgctccactttacaacattaagggacaaccagataacgttagagcatttggcgaaggtcaaagtcaacaagtttcagaattgagatatattgcaacttctgcaactgctaccccagaattattctataaattatcaagcggtagaggctatttaaagcagtcagacgttgctgtaagtggtaagattttaactcctgttaacactccagaacaagctagagcagacgttacagttgctacagcagctgataagactaagttgcttcaagacattaacgaagcaactagtgttaagaactcagaagcttacaagtttgcttcaagtgatgccaaggctgcatatgatagggcaattacaaatggtactgctgttaacaacgatgctacagctactattgctcaagttaacgaagcagatgctgcaattgttagcgctaaggctaaacttaacggtaagaaaatcactgtatcaagcattagtaatttgactccagcagaagtaacttcaattgtacaattggttgcaactgctaataatgtaccagaaagttcaattcaactttcaaatagtggtgctttgacaattgttactaatggttatactcaagttttaaaccttagtgattatgttactcaaacttcagcaacttcaactaactagaaatgcataaaataagacgtagtatctgaaaggacactacgtcttattttttaggatattttcgttgtactagaaagtacaaatatattctaacttttttagcgattaatagttagtgcttttttatggttgcggcaaaattcttgctataattaaggagaatgtggttctttttagagcaacttttgctaaaatagagctggttaaatatttttacggaggaaattatgtcctataaagacgatatgatgatcttcgcccttaactcaaatgtaccattagcacaaaagattgcggatcgtgtgggtgttccactttccaagtctagtgttgaacgtttcagtgatggcgaaattcaaattaatattgatgaaactgtgcgtggtaaagatgtctaccttgtacaatcaaccagtaagccagttaatgacaatttaatggaattgttgattatgattgacgctgtacgtcgtgcaagtgctcgtacaattaacattgttatgccttactacggttatgctcgtcaagatcgtaagactcgtgctcgtgaaccaattactgctaaattggttgcagacatgcttcaagctgcaggtgctgatcgcattctttcacttgacttacatgcaccacaaattcaaggtttctttgatattccagttgataacttaatgggtgctccacttttggcagactacttcttgcgtaacggcttagagaaagacgctgttgtagtttcaccagaccacggtggtgttactcgtgctagaaagcttgctgaattcttaggttgcccaattgccatcgttgataagcgtcgtccaaaggctaatgttgctgaagttatgaacattatcggtaacgttaagggtaagcgtgctatcatcattgatgacatgattgatactgctggtactattactttagctgctcaagccttaattgatgcaggtgctactgaagtttatgctagtgcaactcatgctgttctatctggtccagctattaagagattgaacgattcaccaatcaagaatttggttttgactgattcaatcaatcaaccagcagagaagaagcttgacaagatgcttttggtatcagttggtccattgatgggcgatgctattaagtgtatccaaaaccatgaagcacttagcccattgttcaacaccagatacgaagctgacaagaacaagtaagataaaatttgataataaaaaatggctagccgatgaggttagtcattttatttttttttgaaaaaatcatcaccatttataataaataagagtgtattaaaatacacatgagaaacatctataattagagatagatgtttttcatttaaagaggacaaaattatgacacaatatttatcattcgatattggcgggactaacttgaaatatgcattaattgatcaagaagggcatattcttgaaaaagaccgggtaaagactaatactgaaaacctagatgcattcatgcagacgatgtatgaagtcgctgacaagtatcaaggaaagttcgctggcattgcagtctgtgctcctggtaagattgatactaagaataaaattatctattttggtggagccttgccattcttagatggcttgaatttagaagagactttaggtaaaaaatatgatgtaccagttggcgtagaaaatgatggtaaagcagctgctttgtcagagcaatggctaggcgaattgcatgacgtcaatactggtatcgcaattaccttaggcactgctgttggcggcggtgtcatagttgataatcgtattttacatggctggacttttcaagctggcgaattgagttggatgattacgaattcaagtattggtactaggaatatggctgcttatgctggctttagttgttctgcggttaatatgatcaaaaaagttaacctggctttggggaatatcgatcttgataacggcttgaccgcgtttgaggcaattaacaatggcgatttaagagcactagccgtttttaaacgctattgccgcaatgtagcaatcatgatcctcaatattcaggcagtaatcaatggctctaaagtaattattggtggcgggattagtgcacagccaattttgattgaagaaattaacaatcaatttgataaaattttgcagaataatccaatgttgaataatcaagtgattaagccggtgattgtggctgctaagcatggcaatgattctaacttatatggtgcactttatgcattactgttggaattaaatgacgaagaagttaggtaaatattgcaacacaaaaaggggatgcgtcgcatcccttttttacatgagctaaataataatttaatctttgccagaaacaatcttggcaatcgcaatgctggcaccagcaacgcaagctaccatggcggttttacaaccaatcttgactacgtcttttaccaaatccttattttcatgaatgaagtcaaaagacattttagtatagtccatgcaataaccatgaactgtgtccatcaagtctttaacttgagtatagccgctcttaggttctgcctttacttcatcttctggattaatttgagttcttacatctgtatttaaatcatttctgttcatcataaatacctcgattctaggatttaccttaattttacttcttttgctcacgttttggtcttctcaaatatcttaaggcaccattcttaatatatttttgaaattgctcataaagtggatcgaaaatttgcggctgatcttcatcgtgactgagcatagttttagggaagaagaagcgttcatctccttggaaagtaccatttaatgcgcgaaccaatgggctgagttgggataactcaatcatgctgccgtcgtcttgcataatttcaatttgactattagcatttttccccgttggcttataagcatcatatggttcatcgaatgcggaattggtagcggtatagtaatcaggattaaagccagcttgcttgattaggctcttgagcttaggtaaaagatttttggtttcttcatcgattcggacactagctagcggttttctgtacaagtaacgcttggctaggtcagataagattggatcttgtgcctgggtccacatagaaaaattagtttccattactccatcatcaagctttaaataatcgtctaaagtccaattgccttcaaggaatttagtcaagctaggtgtaacttgcagatttccctttttataaacagtttgagcgcgctctaaaaggtgatgcaagatgacttccattgagcgtcctacgcggtggaagtagacctgttggtacatctgatagcgtgacacgatatagtcttcaacggcatgcatcccattgttggcaaaacaaataccattttgataaggacggattacccgtaaaattcttgataaatcgaacctaccatagttaactccggtgaaataagcatcccgctgcaaataatccatccggtcagcgtcagcttgacttgagatcattttaaccacttgcggattaggataagtcttagcgattacgctggcgactaattcaggaaagttaggtgcaacttgttttaatgcatggttaatttctgtattaggatcagtaatgatcttttgtccaattttttcatgattggtgccaaaaaggtgctcgaatgtgtgcgaatagggcccgtgaccgatgtcatgaagcaatccggcacattctaccagtaatcgattatcatcgttccagagaccgtctcctggcgtaattgagggatattttttgctaaagatatcgcaaattcttctcgttaattcataaacgcctaagttgtgctcaaatctagtgtgagttgcacctggaaaaacatagctaacaggacctaactgtttaatgcgacgcatgcgttgaaattctttagacttcagtatgtccaaaacaactttatcttcaatatgaatatagccgtgaaccggatcacggagaacaacctcttgttttaatttttcgctttgaaatcttgtcataaaaatccaccaagtttaatttattaattttttgaactatatataataaaatagattatatctaactaaaattatatcagagatatagtaataatgtttaaagggggcgcttgtttgacagcaattacgattgatttgactagtaaaattactcaagacgatgagacagagacttttacgcgacatgcgcaagggcaattgactgaagaaggcgacgtcacacgaatttcttatgccgaagaagggcaaattccagtgaagatgcttctaaaggagaatgaattgttgattcgccgcggcgttgacagcaataattattctttaatgaaatttattccgggtgaaaaaggcaactgccgctatgtagttgaagggcgccgcatggacatgaccagcgtgactaacttgcttgaatatcagagtcaagatgatggttcacgtaaacttcgggttgaatatgacctctttaatggactatacttaataggtaactatgcagtcacgttgatttttacttaaaggcctagtagaatagtaaagattgtataagagaggacgtacagctgtgggattagacaaatttaaagacaaaaatcgcgatgaattgtcaatgatcgaagttgctcgtgcaattttggaagacaatggcaagagaatggcatttgccgatattgttaatgccgtacaaaaatacttgaataagagtgacgaagaaattcgtgaacgtttaccacaattttatactaatatgaacactgatggtgaatttatctcaatgggtgaaaatgtttgggcacttcgttcatggttcccatatgaatcagttgatgaagaagttaatcaccctgaggatgaagaagacgattcacgtaagcaccacaagaaggttaatgccttcttagctagcgctactggtgatgatgacattatcgactacgataacgatgatccagaagatgacgacttagacgccacagacgatgatactgatgatgtattgccagatggcattgaaggtcaattgtcacaattaaatgatgatgatgatgatgacgaagaagataattaatttgcttgacttaagaagaaaaagcagataatatttttgttgggcaccctatgtgcgtttagctccccgttagtgggagcttttttgtttaaaggataagttaaaaggagcagaacatgacaaaatacatcttcgtaactggcggtgtcgtatcttcacttggtaaagggattactgcatcaagtttaggtcgacttcttaagaatcgtggcttgaaggtcactatgcaaaagtttgacccatatattaatattgacccaggtacaatgaatccataccaacacggtgaagtttatgttaccgacgatggtacagaagctgaccttgacttaggtcactatgaaagaatcgtagatgttagaactagcaagtattctaacgtaactactggtaagatttaccaagaagttttggaaaaagaacgtcgtggtgactaccatggtgctactgtacaagtaattcctcatattactgacatgatcaaaaagaagatcatgcgtgcagctttgactactgattcagatgtaattatttctgaaattggtggtactgttggtgatatcgaatcaactccattcatggaagctattcgtcaaatgcgccgtgaagttggtccagaaaatgtaatgtacattcactgtactttggttccacttcttcacgctgctcatgaaatgaagactaagccaacacaacactcagttgcggaattgcgtagtattggtattcaaccaaatatgctggtacttcgtgctgaacaaccaattgaccaagaacacaaagacaagatttctacttttacagacgtgcctgttgatcgaattattgaatcaattgatgctccttcattattcgatgtgcctttgaacttccaaaagcaaggcatggatcaaaaagtctgtgatttcttacacttagagagtccaaagccagaagctgacatggaagcttggaagaagcttgatgaacgtgctaagaccttgaagcatcacactaagattaccttggttggtaagtatgtagagcttgaagacgcttatatttcagttactgatgctttgcaacatgctggttatctttacaacactaagattgatgttgataaggtacaagctgaagacgtaactgaagataatattgcagaaatcatgaaggattcagatggtttgattgtccctggtggttttggtactcgtggtcttgaaggaatgattactgcaattaagtatgctcgtgaacatgacatcccattcttaggtatttgtttggggatgcagatggctagtgttgaatttgcacgcgatgtattaaaccttgaggatgctaattctgcagaagcagagccaaactgcaagaataatattatcgacattatggctgataagcgtgatgaagaaaatattggtggtactttgcggttaggtatttacccagctactcttaagaagggaactaagactcgtgcggcttacgatgatcaagatgttattcaagaacgtcaccgtcaccgttttgaattcaataatgaataccgtgaagcctttgaaaaggctggtatggtcttctcaggcgtttcaccagataaccgcttagttgaaattatcgaattaccaaagaaaaaattctttattgcagcacaatatcacccagaatttttgagtcgtccacaacgtccagaaggcttatttaagtcatttattggcgctgctagtggtcttccagcacaagaattttaaagtgattaaagtttgattatacaaaatcttaagaaaacaagaactgagagacctcagctcttgttttttttgtaaatatcctttaacattattatgattaattgaaagtagaaaaggatttgttttcgccaatgaagcagatgataattcatggtggaaagcccctgcagggtgatgtttggatcggtggagctaagaactcaacagttgctcttattccggcatcaattttatcaagaacaccagtgaccttggaaggcgtcccaagaatagctgatgtagttaacttgatggacttattgagtgagatggatgtacattgtgatttcggtgaaaccactttaagaatagatccaactgatatcaagatgagtccgttgccagctggtaagattaagagtttgcgcgcttcatattactttatgggtgcgctacttggtcgctttggcaaggcagtagtgggcttccctggtggtgacgatattgggccacgtccgattgaccaacatattaagggctttgaagccttaggcgctagcgtaaaaaatgaaaatgatcaaattataattactgcaccagaagatggtttgcatggagcaaaaatccatttaaagatgccatcagttggggcaacgatgaatattattatggctagtgtgacggcacagggccagactataatcgaaaatgccgcaaaagaaccggaaattattgatttagctaccttcttgaacaatatgggggcagttattcgtggtgctggtactgactctattcgaattgaaggggtggagcagcttaaagcacagattcctcatacgattattccagacagaattgaagcagggacttatgttgctttagctgcctgtattggtaatggcattcgcattcataatattatcgaagaacaccttgattcatacctggctaaagttgaagaaatgggtgtagtaatcgattcagatgaagattctttgtatgtttacccagcgggcgacctaaaaatggtccaggtgaagacagatgtttatcctggttttgcgacagatttacagcaaccaattacaccacttttattaactgctaaaagcggtgaaggtgtagtaatcgataatatttatcctaaacggattggtcatattgctcagttgcaaaagatgggagccaatattaaagttgaagataatattattttggcccatccaactaagcagtttcatggtgcggaagtaactgcaggtgagattcgagcaggtgcctgtctgatgattgcaggcctgatggctgatggtacaacaacgatcgacaaggctggtaatatcttgcgtggttatgatcgggtccaagaaaagctgcgtcaacttggagctgatgtaactatcaaggatgatcctgctgtaccgggtattttagataatatttagtaaataaaaaccacatggaaaatctccgtgtggtttttgtaatgatatgtcgatttgtaggtgaacaaatgagtttaatttttacaagacgtgcacaaaattcagatgtggataaaattgtgcaaattttaaatgatgcgacttcttttttaaaggaaagtggctcatcgcagtggcaaagtggctaccctaatcgagcaactgtagaagatgatattaaaaatgggtgtgcttgggtattaactgtggataatgaagttgcaggttatgcggcagtggtaattggccgtgagccaacttatgcggatattgaaggcaagtgggaaaataatgtggacacctatgcgacaattcaccgcattgcagtttctagtaagtttagaggaatgcatttgagtcaatttttcttgagcaatattatttctctaacttatgcacaaggaattcacaattttagaattgatacaagccggaaaaataaaattgtccagcacattgcagttagtcataattttattgaacgagggattattcaagtaactgaagatccggttgattcaagtagaatagcttacgagttgaatttaaggtaatgaaaaaccacatgggatgtgaattccatgtggattatttttttgctttatttattaatcaagcaagtcgtatttcaaagtcattaaaccatgaccttcgtcaaccatttgaccaagcagttcaacagtgttgttataaactgtatcagacatcttttgattagcagcaattaacttgtcttgtaattccttacctgaaaggttctttgcttctttgtcagtatcatgttggatcttgtgacattgtgctaaactcttttgttcaaaggcgtcttcaagttcaccgtaaacacggtagttggtatcgcctaattgagcagttaacttgttaagccagaaaatcttgctcaagttaaacttaggagtggtttgccaagcttcaggggtagtagtgatattagtatagaatggcaccattgagttaaaggtgttaggaccaaaggctaaccattgtacacctgcaatttctgcaggaacatcattacgaatttgcaaaatatgggtttcaaagtttctgttaataccgataggacggaaggtcttcttttgttcaggagtaccttgatcgccataagcatcgtaaggagtgtcttggtagtgtgagctttcggcccatttaatatcttcaattgagattaaacgattagcatggcagataaaaggttgatcttgatctgctggagtaccaccaaagtctggatcgaaatagttgtgaatataccaagcacggggattattgtagtgagcatccttaatagttgaagaaccaaagatgtggcgcatgttgtagccttcacggtctggattcaagtgatattcttcgattaaatcctttaggtctgctgaacaagcaaaattatcagaatcgttgaagtcgaaagtatcaatattcaaacggtttggtgcaataacatatgcatcatctgggatacggcgtgcaatccaatgatgaccaccgatagtttcaaggtaccaaatgttatccttatcagaaaaggccataccgttcatttcataagtaccgtatttttcaactaaatagccgacacgtttaacaccgtcaaaagctgagtgcaagtatggtaaagtcaaagtgacgaaatcttcttcaccaagaccaccttcacttggatcaagtaatgggtcaacaccttggatgcgtgaattagtagtgatggtttcagtagcggtcatggctacattttcagcgttaattccagctgcgccccaaataccatttttgcctgaaacatcaggtgctgaagtatagcgtaatggtgtttctgctaaatcagcgtcgtcaatcttttgtttagaaattacactagtgtagtgcttaggttggtcagctgggttaacagctttaaagccttcagggatgatgacgcgaccaccgtcttcactacgagcgatcatcgtagagccatcaatagttgcttttttaccaactaaaatagtagtacattctgtttgtttcattggatcattcctttacttttattatgtttaaattatttcctaataatattgtatgcaaaaataatccgataaggcaaagaatataattaatttccccgaaaggcatttggactaacaccgctatagcgtttaaatgccttggagaaggtaaattcatcgccgtagccgactttttgagcaacttgccttagattgtgcttggtattaattaattcttttttagcggcttccatgcgcaattgcatgaggtacttttgcggcgataatttagtgttttttctgaacaaagcatataaaaagctgcgtgatactcctagcctatgacaaagttcaacaatattgcaggtaggatcggtataattttgattaagataattaatagcgatttgatattgatcatttttaggtgttttgcggactggtggatggttaggaaagtcttttactagatgataaaaaagttgataagttaaagctgaaatttttaaattgtttaataaggtctttttcttcgccaaacattgataaaggtcatctagggtttgataaaaggcagttttttgaatttgacgcaagaaatttttattaggtaaatttgatgccttgatgctttcattaacgccgttgccagctaggccaatccagaagtattcccagggttcattgtggtcagcttgaaaggaacaagtttgactgcgtggaacgtaaaaaagatcgccagcttttaatttaactgcgtggtgtctactagaagtaaaggtaccagttccgctaataatgtaataaaaaatatcgtttttacgaagattgtcaccttgaaagaattcatcgggctgacatttttgtcgaccataaaacatgatgtagctatcaagattttggttatttaagttaggcatagacttcctcactgttgaaaaattatgttacttctattatagaagagattttgcttaaaaggtgaagaatgaaaaacgaccacattaagcggtcgttcgtgaatatttatagaaaattatgatatggaattatgaaatgaaaaggtattttacttattggcaccacttcttccattgaataaaagattaagcagagttgcacagatgctggctacgacgataccgttgcctaagaacaattgaatggtttgggggagagtttggaagatttgaggatagacagtaacgcccaatcccatcccgattgaaatggcgacaattagaatattgcggttgttctcaaaatcaactttggttaacattttgattccttgcacggcaatcattgtgaacatgaccaacatggctccgcctaaaactgagtcaggaatgatggtaactagagcaccgattttaggaagtaagcccatggccattaataagccagcagcccagtaaatcggacgcttagtcttaatgccggataattgaagcaagccgacattttgagaaaaagtagtgtaagggaaggtgttgaaaagcccgccgaagatttgtgctaatccttctgcacgataaccttttttgaggtcttcttcggtgatatcttgatgaagtaggtcgccaatggcaaagaagacgccagtggattcgaccaaggaaactaaggcaatgatgatcatggtcaaacaagatgaccattcgaattctggcaccccgaagtagaaaaattgaggcaaatggaaccaagaagcttcggcaactggctttaatgaaacaagtcccatgcagctagcgattagagtaccaacaattaatccaattaaaacggaaatggaacgtaagaatcctttagcccagacttcaatgacaacgatgatgaggatggtgataaaggcagcaataagatttttcgcatcaccaaagtccttggcttgggcatttccgccacccatgttttgaaaggccacgggaatcaaagttagtccaataactgtaattaaggtcccagtaactactggcgggaagagttttttgatttttgaaaaccatccggcaattaagaaaacaaagattccagcaacgataatggcaccatacatcgtgttaattgaaaacttctgcccgatcatttctaagggagctaccgcttgaattgcacagcccaaaacgactggcaagccaatgccgaaatatttattacggaatagttgaattaaagtggctaaaccacacatgaagatatcaatcgaaactaggtaagtcatctgtgtgctattgaagtgtagtgccgtaccaattaaaaggggaacggcaactgcaccggagtacattgccagcaaatgctgcaaacctaggacagcagcttttttgtgactaacttctttttgtgccatttttaattattcttctccctcgaagtgtacttgatcattttcaaagctatcgatttttgctagggcttcaaagcgtaagccttcgttttctacccattcgcttccgccttggaaggtttttgcaacaacagcaccaactccaacaatgtcgcagccggcttgtttagcaatgttaaccatgcctttgactgcttcaccgtgggcaacgaagtcatcgatgattaagatatgttcgcctgggtgcaaaaatttctcttcaacgcagatcttattgttgaccttcttggtgtaagaaaagacgtcagcccaataaactgcatcattcaaagtagacggctttttctttctggcaaagatcattggcacgtgcagttggtaggctgccatgacaccaggagcaatcccggacgcttcacaagttaagaccttatcgactttttcatctttaaaaaggcgggcaaattcttcaccaacatgcatcattagttgcggatcaacttggtgattcaaaaatgaattaattttaagcacatttccaggtaaaacttcaccatcttgtttaattcgatctactaattccttcaatattattctcctcaagaaagaaataaggacttcttctacctaaaacaggtaaaagaagtccttaagattattcttaactttcattcacctatagtccggtatttacggtaccgggtagagactgtcgaccttatttcgacgatatatagatatttgtgttggcttaatcttaacagaatatattgccgaacacaagtggaaaattaaggattaatgttcgattatagtaaaaattattcagctgcgatatcgttatggcacagactgatgatcttttcgataatgccatataagatccccgcgattggccagatgatccagctgcgttcccaatcattggtaatgaagctatatcctagataaagtaagactgctattaaccaatagagtgtggcgtatttgttcataatcttgcgacagccggttaattggattgttaaattgcccaggtcaagcataatagctagggcagtagaaaagcaaaggatggctggactgcgaataattaaactaatggctaaagcgcgaaggctggcacttttttgagcagctgttaagtagccttgctcttgttgatcagataaaattggcaattcttcagttaagttattatctttgtggtttaattcaaaagaaggtgagccgcttttgagtaaataatcggtggtcactccaaataattctgataaagctacaattttttcaatatcgggaattgattgttcactttcccatttggatacagcttgccgactgacattcatcttttcagctagtgcttcttgaaaaagatgatttttcttgtgtaatgccgcaattttttgacctaatctcatgattgatcgtcctttcgttttgaaataatttgatttaacgaaaatttgcggttgcagaccaccactttttaattgcatttagcgcaactagtagttgcaactgctggttgctcaagataaaagccgaacaatgaatggctatttttaactttttgattgacctttttaatttttcctagtagagttagttaaaaatgcgtaattgaaaagagggagtaaatagtggctaagaatctagacgattttgataaaattattgtgcttgacttcggtagtcaatataaccaattaattacccgccgtattcgtgacttcggcatctattctgaacttttaccacacgatctttccatggagaagattaaacagatcaatcctaagggaatcattttctcaggtggtcctaacagtgtttacgataatggtgcattaaaggttgatcctgcaatctttaagttggatattccaattttgggtatttgttacgggatgcaattaatgtctcatgacttaggcggtaaagttgaacaagctgaaaacaaggaatatggccgcgccaacattacggttgaagatccagacagtattttgttcaatggcttgccttcaaagcaatacgtttggatgagtcacggtgatttggtaactcaagctccaaagggcttcgaagtaactgcctcaagcaaaaactgtccaattgctgcaattgctaatccagataaaaagttttatggcattcaattccacgcagaagtgcgcaattcagaatacggtttagacatcttgaagcactttgcttttgaggtttgtggtgctgaggctaactggaccatgaacgacttcatcgacatgaaggttgatgatattcgtaaggaagttggcgacaagaaagttatcttaggtctttcgggtggtgtagattctagcgttactgctactcttttacacaaagcaatcggcgatcaattaactgcaatttttgttgatcacggaatgctgcgtaaagacgaaggcaatcaagtaatgcaagccttgaacaaggatcttggtgttaacatcattcgggttaatgcccaaaagagattcttagacaagttgaaaggtgtaactgatcctgaaaagaagcgtaagattatcggtaaggaattcatcgaggtctttaacgaagaagctaagaagttaaaggatgtagatttcttagctcaaggtacgctttatactgatgttatcgagtcaggtaccaacactgcccaaacgattaagtcccatcacaacgttggtggtcttcctaaggacatgcatttcaagctgattgaaccactgcgtaagttgttcaaggacgaagtacgtgaacttggtgaaaagctgggcattccacatgacttagtatggcgtcagccattcccaggccctggtcttggtatccgtgttcttggtgaagtgactgaagacaagcttaagattgtgcgtgattctgatgcgattttacgagaagaaatcaagaaggcaggtttacaagaaaagatctggcaatacttcactgttcttccaggtattcgctccgttggagtaatgggcgatggacgtacttatgactacaccattggtattcgtgccgtaacctcaattgatgggatgactgcagattttgcccaaattccatgggatgtacttggtcacatttcagatagaatcgtcaatgaagtagataacgttaaccgcgtagtttacgatgtgacgagtaagccaccttcaacgattgaatgggaataaaggtgcttcctaacttgaatagagaatagcgatctaaaggcattctcaagtaggaaagtctatgaaaaaatataaaaaagcagatgattgtttgccaattgtttgccagaaaaaataaacttcttagttattaaaactaggaagttttttgttgtattgaataaaaattcattatcccattgtcaagagaagctatggtgtttgataatagaggtattaattattttagagattaggtggagaaaatgacagttgaatcaaaggcaatggatcacataagaaaagtattagaacaatttggaaataagtattttgcttctaatggagctttaaaacggacaacggttattgaggatttggataattacgataaagatttaatgactgctttattaagtgatgatttgttgcacaagacttatacttctaagattgcaggcgttgagatctttgaaattaacaagtttgttgatatgttgaagtataaggaatactgggcagatagctttactaagtttgataataaaattggtttaactgttggtggcaaatatattgatgattcagaagatgttgttttggacttcccatataaagatactgtgcttaaagctgggatgaccaaggaagatgttgagcatagtggggatgcagatgaatctttcttgaatgaaacactggccaaacctgaaattgatgaattgctagaacctaaaattcttgttaatgctactaaatatgataaaagtggaactcatagagcgaattctattaaaaatgatgatagtttaattcttaagggaaataatttaattgcgttatatagtttgaaaagtcgttttactgagaaggtaaaattagtttatttggatcctccgtacaatactaagtctgattcatttaaatataatgacaagttttctaactctgcatggctaacttttatgaaaaatagacttgaaatagcaagagattttcttactactgatggatcaatattcgttcaaatagatgataacgagatgccatatcttaaagttttaatggatgaaatatttggtaaagataactttataggaaatattatttggaagaaaaaaacaggttcatctgacactactagtattgctattgttacagaatatatattagtctacgctaaaaataatgcagaggtaactttctctaaaaatccggattcttatgataaaaagaggtacagatatactgatgaatacgttgatagacggggaccattctactatgacacattggatagaggcgggttgcagtatagtgattcattaaattatggcgtaacagcacctgatgggagtgtcttatatcctcatggaagacatgaatatgttaatgatggttggatctggaaatggagcaaagataaggttaaatgggggttggaaaatggcttctgtcaatttataaaaactggagataagtataaattaaaatataaagtatatttaaatgttaataacaaagatgaaataataaaacgaaatgccccttggaagaacatcattgaaggaattatgaatacgaatgctacttctgagattaataaattatttggaaataaagcttttgatactccaaagccagaagcattattaaaattcattataaatttaggaacatttgaagaagatagagtaatggatttctttatgggatcttcaactactcaagcggttgctatgaaaatggatagacattttattggcgttgatcaaatggattatgttgatactatatctgttccgcgacttcaaatggttattaatggtgagcaaggaggaatttcaaaggacgttaattggaaaggtggcggatcatttatttatgcaaaattaatgcctaaaaatcaaaattttgtaaaagaaatacaagaagcagaaaatattgaaacactcttcaagattttttatcgtatgaaacaggaagctgatattgattttagagtcgatcttgataaatttgagaggtcaattagtgaacccggtactccgatttttttacaggagtgtaaacgtgaattaatcagaatcttagataaaaatcagctttactacaattatgctgatattgatgatgcagatgtaagaagcaagctttctgataatgattatcaattcaataagagcttctattccctaaatgaaagtggtgaggaataatggctaaaacacaaaaaggatcagctagaaacaagccatttcctacccttgaaaaagctagaaattcaattaatagtttattttttgataatgataagcatgattttgcgtatttgaaggataatcttaaacataaattacgaagatatcaagagtctgcactgttgtatttatactggtcacaaattcaagataatgctgatgagcaatataatcagctattgtttaatatggctactggttctggtaaaacggatgtaatggctgctgctatactatatctttatcatgaacaaggatttaagaactttatatttatttctaatactactgctgtagttgataaaacccaagaaaatttttttaatagttcatcttctaaatatttatattcttcgccaattattattgacggtgagagaattagttttaactatgttaattctacttttccagtaaatccagaagaaaatactatttacattaagctgacaactattcagactttatccaatgaattaaatgatccgggtgaaaatggtttaacttatgatgatttggctaaattcaaaattgctattcttgctgatgaagcacatcactttaatgttgataccaagaaaagtaataaaaaagccaaggaagagaattcttgggagtctgtattagatcatattagaggattaaattcagcgaacagacagctagaatttaccgctacaattgatgtagataaaccagaagtatatgaaaagtataagaataaagtcatttataaatatgacttagatcaatttatgaatgaaggttattccaaaaaggtgtttagacttcaagctaatactgacaataatcagaagctgcttaatgctgttttattaaatgagtatcgtaaacgaattgccaagaagttaggcatccctaatttcaaacctgttatgttagtgaaatcaaatcgaataaagacttcacaacaggtagaacaagacttcttagagatgatcaataatttatcatccgccgatttagaaagctttattttaagaaatcagaagcttaatgcgaagagtagagctttaagcaaagcttatgaatattggctttcacaagatttatcgcaggctgtagcagaaatacagcaagactttaatttacgtacaactatcaatgtaaatgagggtggtaccaagggaattctttcagatagcaatgactttaaaaatttgaatagtctagaagatgaaaataatccatttagaattatctttgctgttgctaagttgactgagggttgggatgttttaaatctttatgacattgttagaatatctgaagccaaagaatcaattacgatgaataccactaatgctgaagcacagttaattggacgtggtgcacgttattatccatttgtttatcaaggcagaaagtcttacactaggagatttgatactggcagggatgcaacttttgagaatcagcttttagaaacgttgtattatcatacaattaacgattctaagtatattgataacttgaataagtcatttgataagatggacttaattgttaataaagatggtgaatatgatacatacactgccacagtcaagccttcgtttatgagaactaatttctataaacaaggtaatctttattacaataaaactgaaaaggttccagatgcgaattatgcaagtattggtgactatggtattaataatttgacaattgatgttgattataatcagtcaacaactgaaagtaatttgcatgataaatactatgataacgtggttcgtgaatcagatgttagatatgatgtagtagctgatttttctaatccaagtgattatcgattaattgaacgtgctttagctagaaataaattctatcgtttctcaaccatgaagaagtatcttccgatggttaaatctattagagagtttattacttctgatgattggcttggtaacttaaaagtacaagctaaggttccaaatgagtataatcaaattttatcaccatttgaaaaattacatattcttgataatgctttgaagattattcaaaaaaacatagttaaaaattatcaaaaagaacgtggtacaaatcaatttatacctattgcagtcaaagatgttgttaaagattatcagaaggtaattcctaagctatctaataagactattagcgaagtcataaagcctaagcctatgtctaaggctaattggttcccgtatgattgggcaattgctgatcaacttgaaacatcactaataaatagaattgaaagttggttagatgaattgaagcagactcataagaatatttatttgattcgaaatgaggaaactatttctacatggtcacttcatgaatttgaaaataatgaagttaaacattatgaaggttatatgcctgatttcattcttgttttagatgatggagatattatgtatcaagtatatatggaacctaaaggtgaccaattacttgaaagagatgaatggaagcaagaacttcttgaaagtattagacctgaaaatattgaaataattggtgaaacaaaagatgttagattgtatggcgtaaagttctatacaacaggtgatggacgtggaatttatgatgaattaaaaaagaaagaaatttttcattagcaaagttgtatgaatgctattaatgtatacttttatttgctatattggttttataaccaattagtattaatttctcttactacgtgttcgaaattgaagagaaaatttgtttatttaattactatacgtaattggttaagcagattttctctttttttatctattggttataaaaatgttgttattggtattgccatatactgtgttcttattgaaagagaggtacaaaaatggcaggattaaaaggccttcgtggctttcaaaagtttgatatcagtggattcttaagtggtaagcaattgttgctcatgggcatggaagatctcaaagatcgcgaatctggtaaagttgtcggtgcaaaaattaagacagttatctggacagatgacactgcttacagtaaggaaggcattaacaacgaaggtagtgaactcgacgttaaaattgagggattgaatgctgaaacagttgatcgtaacaaccgtggctttgttaagctaagaaatcctagaggtaccgtatatggtgattttcaaaatcaactttctgttaaggctgatggctttgactatgttgatgaaaagaaaaatggtgaaaaataatggcacaaagaattcgtaagcctcagcaaggtggcaatcctgagagtatcattcctaagttggatggtacttcttagcacttagtattcctccacgtataattgcaccatcgttaccatggttcgctaatttttgcgagtttgttagtaactttgctttaattctcactttaggatgcttagtttattggcttttattaaataaggctgatgtcaaaaactatataaatcttttctttggtaagaaagttcaaaatcaagttattgatttacggcccgttttaggtagaaagtttagaaacttcttagtggagatgggcatagtaattcaagatcccaatagattagatagtgtctatgttcctaaagttgaacagatttctgatggtcgccttaaggtggaagcaataggcgacttaaggaaaaggcttgtatctgaaagttttatttggggcctagagagttaccttaatggtagtggatttgatatattcgttcaaagtgcaaattacagattggatggatgtgtttacttcactttagttcgaggaactagatctgataggatgagtttttaacgtgaatacttctctatataaggttgcattatctaagtcgttttcttgggatgctgctaaacagataaatgcattagtgggtggaactcgcggctctggtaaaagtttttttgctttaggtgcacttgttcaactggctagttttccaagatttgatgaaagtaaattattgggtattggtacgttaccgaccccaatttttactatcgattttaaaaattcagatattgctaggctgggtgaattacttcctaaaaaaagagtagcagttaataaaaaagaagctattgctgttcttactcattttgatcaattaatgcatcgacgacttaaagtaattagagattattcttttggcgctactgcttctaaactaaaaatgcctttgtattatttaattattgatgaatggtcagcaacaaatgctgcttttatgagtggtatgacgaaagctgataaagatcttagatatagatggcaagcacttattcaagatatttctatgcttggaagggctgcagggtttggactaatcgtaatttctcagcaaatatccgtgactaactcggggattagttcagctgtgcaagaagaagcgggattaaaactacactttggagatgcagaaatgagtagttatagattaacttttggcaatgaagtacaaattcctgatgttcaacttaatgtgggtgaggcattcgcatggattgaaggggttacttcgtcaggatatgtaattccttttgccgctccttatgttgatgctgctaatatatggaacattttaacgcaagcattagcaagtcaagatgatgactattatcttgactatcggttgaggtgatgattggaaaagtagcgccagcaggcgcgttagcgctgtggcgctgatggttgcgaagcaaccatcttaacttgattaatgggtgattttagtacataaaaagtgaggtgacaagatgaaaactcagaataacaagaaacgaatcaacaaacatactaaagttaatgcctataagtatggcaatgtcttagagatgactaattctgttgcatctcatgatgctacaattttgccattgtctggaaatgagtatgttgacctttcaactggtgaaattaagcagtttaaaaatcgaaataagcttagagttcaatcgccggttaacttaaaaaagacatttcgtaagctaagaagaataattctagataactttagtggtggtgatctttgggtaacacttacctataagcaggacaatggtaaaccgatgactgacactgctagagtttataaagactttaaagccttttggcgcagatttattgcggcttatggttcgagtgactatcttagcagttctcgaaccgcaggcaagtggtagctggcacttgcactgtttgataaagaagaaagatggtaaatttccttttattgataacaatgaaaccttagagccaatgtggcgacagggatttactaatattaaaaagttgaaagatagcgacaatattgctgcatacttaatggcatatttgaccaacgttccaaaagatgagattattcctggaactaaagataaagcaataataaaaggggcaagacttcatttctatccatctggagttcatatttatcgtacttctcgcggaattaggattcctaaaaagttagaaggctcaaaacaagccatattgaaagaatatgggctatcagttaatgaagttgctgatgcagcattttttcatgagcaccatttttccgacgataggacagccaaatttgtaacagaattttatgacaatgtaggtaataaaaaagaagctagtcacggcaatgaatagcttctcgaattgaacaaatctgctagactgttcaacgtttattatctgctaagtcacagtttttgcaaaggagaaattatgagaactgtaacttataaagacttaatgaagcttggattcaaagaaaatcaagctcatgacatcattagacgtaccaagcaataccttgtacaaaaaggttatggctattataatgggagacgcataggcgttgttcctgcttgggcggtgcatgaaattgtcgctattgatctttagaaaaaagaaagatggtggctgtagtgtcaaacactaagactaagtattctggggtttaccgtgacgcaaaaggaaaatatttttataatatctttttgggtcgagatttaaacggaaaacagaaatttaagaaaggaagaagggatgccttaggcaatgtcattaagttaagacattgacaaattgaatctaatctctgtagaaccgaatcattatgatttggttctttttttgcataaaataaaggcgaaaagaacctaccttttcgccctctgattaaattattaaaccttcaaaattattgccagaaagctggtgttaattatgaaagcccttcacagaaatattttagatcgtcttgatcaaattatcaatgatactggaaagcatattcatgattttatcgatgatcctcatgccttcactaggaagcggtttttagatgcagctacagtcattaaaactactattaatatgcaaggaaaagatttgaccagtgagttgtttagagcttttggccaaaaagctattaaaaataacgataaagtagtcagtacttccgcttatgtccaacgcaaaggtcagctttcacccgcatgttttaagcatattctaactgtatttaatcagaatttatttaatatccagttatttgatcataaatatcgtatatttgccattgatgggtctgattttaatcaaatctggaatcctaaatcagagaatatcgttggaaatctcaatcataaaggaaagccatattgccaaattcatgttaatgcactctatgacctgttaaataatacttatcaagactgcatctttcagcctaagtcaaagatggatgaacgtaaagccgccgttcaaatgcttaaaaagctaaattgcggaccatatatagttactatggatcgaggttataccggctttaacatgattgaaaattgtaatcgcctgcctaactgttattatgtcatacgtactaaaacgggatatggcgcatttaaggaagtagctgagttgcctaatcaagagtgtgataaggatatagcttgctgggtgactacctctaattattattatgaaacccataaggctacagaaaacgttcatttggttaaccatcattaccgtcaatatataaaatatcggtctaaaaataccaaagatggcagctgggactttggagagttatgtacaataaaatttcgtgcctgtaaatttagaattaatgatcctaaatcaggcaaagaagaatgggaagttgttctaactaatctaaatagagccgattatcccttaaaaaggatcaaagaaatctaccatttgcgctggggcattgaaacttcattcaaaaagttgaaatatgctttaggtagcgtacagtttcattccaagcaggatagatttattgaaatggagatctatgcccacatgattatgtttaacgcagtcagtcaaattgatgctcaagcatatgtaccacaaaaaaaatgcaagtatcaatatgcgatcaatttcaaacagtcatgttttgtcatccaggctatgtatataatttcttcttcaactgaaatctttaaaaagattcttattcaaattagtcattacacaattccgatcagaccaggacgaaaagacaaaagaaatctcaaacccaaatcagctgtatattatttatatcgtgtagcctaatttctaaacaagatttgggtttatttggcatgaaaaaagagcattcaaatgcgataaatcgcaaatgaatgatcttaaaagtccaagtcgataatttgtcaatgtcttaacttaatgacattgatgccttagggcaccccttttcttcagcaagagcagctcacaaagaagctgaacgagtcaaacagctatataaaaatattgatttgaatgatatttcttatgctaaattcatgaaagatcgttttttgccaaagtataaaggcgatgttgaagaatcaacgtacaatacacatggaagaatgtttgctaaagcaattgatttcttaggtgatactaatcttaagaaaataaccgttgctgattgcgaacgatatcgcacatggctattgacggatgcaggttactcacaaagctatgccagtattatttatactgcttttagacaatctttagattatgctgttgagattagcttattaaccaataatccttctctcaagactaaatctattcctaagggaaaagcagttgagaagtactggactaaggaagagtttgaaaaagttataaattgtatttcaactaatagcttttacgaaaatgcaatttatattacttttctattcttttatcggatgggatgcagagtatctgaaggttttgcattgaagtggactgatattgatttagaaaatggtcgtgtgaggatatttcacaatatgcgttatcgtagcaaatttgattatgagattaagccttatactaagactgattctggtaaaaggactttgacaatagatgatgaactactggaattgctaaaagcatggaaagcaagacaagctgaaaacggtgtacatgaatttgtgttgagttttgatgactgtccgcttaataagtctacattaagtagatggcttgaaagatacgctaaaatagctggtgtaccacgaattaatggaagaggattacggcactctaatgctagttatctcattgcagagctgggtgcagatgtattaacagtggctcatcggttaggtcataagtcaccaatggtaaccttaaaatattatgctcacatgtttcctgataatgatgtaacaattgcatcccgtatggagggaagtatgaagcttacaccagctaaagcatcaaagattagttttaatggtaaccagaacataagtggtgacaagattaaaagtttgccaattgtttgccaaaataagaaaaaagcaatgtaaatgttgatataaaaggaacgtatcttattctttgggaataatttcgtaccttaataagaagagggaatcccaatatgacggcatttgaatagggttaatattagtggaaagtaccggttgaaagcaagttgtctaccgtttttctaccggtagaagttgattttaatcagcatgaatagtgcattaaacgctactattacctgttcgttattttggggttgtctaccgaaaattgaatattttgcttacttttgttgaaaagtaagtgactgttgtcctacttattgtcatttgataagtggggcatttttgtttctgctatgaaaaatgtaagcaaatgtatgactatgttctattttcatacattttggactatttgtaccttccatttctcttaccaacgtctacgctagtattccgatatttcaatttagaagtaatcgcattgactagctcttttggcatcttttcggacgtagcctcgcccgcaattatcttataaggctcgatttaactctggatgctttactagcagcgttaggttggccatggcattttcgtcgcgatcaacctttttattgtaattaggacagctaggattataacagacaaactcgttatgcttggtgccatgctttttattgccctgcagcgtgatcttttcatcgccttttttgaccaagccgcatgctgcgcatctttgcgttgatggatatagcttgttggcaataatcagttctttaccataccattcgcatttatatgttaaaagctttctaaacaagccaaacatgcttcgatgcatgccttttgaagccacatggctcataagcatgcctttgactcccagatcttcaatcgctatttgatcgtaattgtttaccagttcagtagtaaatttatgtattaaatccgtttgaatgttttgggcacgctgataggatgcctgaagcttgattctcgtcttcaagtatttcttgctttgcgcacctttaattctaccgttgactgttcgcttctttgccagctctttgttgccacaaaagaaatgctgaaatccaaacggagcagtctgtttgatcgttgttgttacttatgacgaaaacataagtaaatcagatatgaaatctcgaaatgaccttgaatgaaatctcaaggtactcattctcgaatgcaatatctgatcggtcgcaaccgaaggctgaaaatttattttgccgggacggcaaacatgagggggtcattgcacgatgaagccgttaaaggatgagctaattcaaagtcgacttgatgaagatgaattagcagattttgataaagtgaagaaactgctcgatgtgaagagtaattctgttgcaattcggcagatgattaaagatgaaatgagaaagccagaaatgaatggaagcaaggtaatactgacgttgtatcagcgttattaaccaagctgtctgatgaaggtcgcctaccattgtcagaggcgttgatgggtattacaggtactaaaacatcatcacaattgagtatcttacaaaatcagttcgccgatattcaatcacagttagaaagtattatgtattcagtgacaaaaatggtcgattgaacaagtggctcatgtagttagaatcgcctacaagaccatctacaactggattgagcaaggagtattggatattggcgtggctgatttacctgaccatggaattcgccgccgacgagccaaagaaacccgtgggacttttagccatggacgttccattgaagatcgtcccgctgaagttattgaccgtcatacctcaggtcactttgaagcagatacagttttatctggaaagcgtaaaggtcacgcaatagctacgtttgtcgagcgtaagagtcgtcttatcatcgttaaacggcttcagggacgagatagtacctcaataaccaaggccattttagaattagctaaccagttagaagataatctcaagccccttactgttgaccatgggaaagaattcgctaactacaagctaattgaaaagcaggccaggattcccctatactttgcgcatgcttattctccacatgaatggggcagtaatgagaatcgcaaccgagtactacgacgctttatcccaaaggtcaaccgattgagaaaatcactgatgatgagttaattcaaattaactggtatttgaactccaggccactcaaatgtttaaactggcgcacactaattgagatctttttgcgtaatctgcgtcactaactttgttcaagttatttcttgcaatctgccgtttgaaaagagattagccttggcggttagtctcttttactatctggtaagttgactgcaaacagaaaagagagacaagcggtcgtcaaagtcgctaaaccgtgctgtaatgttatcggatttaaaaataccactagttattaaatttgggaggcaagaataacgatgaagcgacttaaatttttagaaactaagcggacaccacgttatagtctgcgtaagcttaacgttggtatggcttcggtattattaggagtaaccatttttggaattaactttacaaatcattctgtaaaggcagcaaccacagaaagcgttgaaaaatccaatagtccagcaaacagtaattcgcaacaaactttagcagctgtattgccaactactgagcaaactaatggtcagcaagcaactagtgcaaaagaagaaggtcaacaaactagtgcaagtaacaatgcaacagctaataattctacagaagctgcgacaaccttacaatctgcaccaaagacgcaaggtagcgctgacactgatattaaatcatcagcagctacagtagatcaaaataacactaatactcagcaagcaactagtgcaacagaaaaagttcgacaaggtagtgcaagtaacaatacaacagctaataattctacagaagctgcgacaacctcacaatctgcaccaaagacgcaaggtagcgctgacactgatattaaatcattagatattagatcattaacagctatatcagcagcgaaattagcaactatgaatttaatgcaaactaatggtattaatggtactgatactgacggaaatgcagcagctaaattagcaactatgaatttaatgaaagcttctggtactaatactggtagtgacagaagtgcagcagttacagtaaatccagataacattaatactcagccagataaagaaaatcaagaattggccaataagcataatctaacttcttcagataactacagttctaatatctatcaaggtacagatggaaagtattacaagattgtaactatttatggtaatgactacgtttaccatactgctgatattcaagctaatggtgatgatgcgacagctgaagatactaaaaataatatcaatatttctaaagaagatttaggaaatggtaagacccgttggactgttgttttcttccctaataagggattacaaaatgttggcagtaaattaagtgggttaagttctgcaaaatttggtattgctctcactaatgactaccaaatcgttggtaatgttgacatggacgtaattagtgatcataatcaaacattttcaacttatatatataagcccggtagtaatagcgctactgaaactacagtacaaaatccaccagctgaagtgaagttttcgtttaatcctaacacggatgttgatcaaaatactggtttaattaatagtaaaactatgccagcttataacaataaatatttgcaaggcccatactatttcactactgctactgatactggtaaaaagaacttatggcagacttactttaaaaaatggggtctatttagtaaaggatctaataatgcatatgatgggtccccttatctaggtaacgatcatgaacttcattttagtgattttaaaattacaaataaaactggagttgacggtgcaaaagaaggggacctagtcatttatgacaaactgggatatgataagttcaacggtaaacttaattctgatggcgtatttagcagttataactttaaccaagcaatggaatttaagtcacaaggtgtcactagtcaagcacaattttcttcttataaaatttcctttactacgcaacacacagactcttatgaagtaaatttagataaaggtccgaaaaatcaacaattctcaggaatctcagctaatatttattcttatcagaatggccactggaacatgttttctcgcttatatggtgagcagagagcactgagtccagctggtgtagtaaaacaagctaatgaagttgtttctggttggggtgatgccactagagctatgggtcagattaagaaagactatttaaataatgctcaaattaatgttttgcggaataaaattctaaataacattacagaccatgatgctgtaagcaacattattaaggaaggaaattccttaaacgatgctatgaaaaagcttggtaatagtatcggacagtatgattctgatggcagttttgctgatcacaaggaagatacaacaaaggcatctgatcgctataaatacgcaaatccagataaaaaggcagcttatgacaatgcaactgaagtaactaaagctttgattaacaaagatacaggtacctatgcaaatcaagcgacggtagaaaagcttactgaagctgaaaataaggcttggaacgaacttaatgttgtcctagcaaataagatcacaccaactgttccagcaaccaaggaaccagtagcaaataccagcagcttaactgaaactgaaaaagataaagttaagaagaatgtggaagaagctaataagggtaacttcccagatggcacagttgttacagtaggtgctgacggaacagctacagtaacttacccagatggttcaaaggacaccataccaggtgaccaattagttcaaggccaaaagggcgacacaactgatgctggtaacattacgccaactattccaggcgacaaggtaactgttaaggatccaagtcacttaactgatgatgaaaagaatcaagttaagaacaacgttgataatgccaacaaggataagttcccagcaggcactgaagttacagtaggcgatgatggtacagcaacgatcaaatacccagatggttcaaaggacaccataccaggtgaccaattagttcaaggccaaaagggcgacacaactgatgctggtaacattacgccaactattccaggtggcaaggttactgttaaagatccaaatcacttaactgataactgatgatgaaaagaatcaagttaagaacaacgtcgataatgctaataagggtagcttcccagcaggcacagttattacagtaggtgatgatggtactactacagtaacctacccagatggttcaaaggatgtcattgctggtactgatttagtcatcgctgctaaaagcgaagatgttcctggaagcaagcatcattcacacaagaatggttcaaactctagtcaagttgatggagttaagggagcttctactgctaatggtagcatcgcaaacgctggtaacaacctaggtgttaagggtgaaagtgataatgcctttgtaggtgttaagggtgaaagtgataatgctattggtaataacaaggctactagcttaaagacattaccacaaacaggcactaaagatacttcaattttgggtgtgcttggtatgcttttagcttcacttggtctattcggatttaagaagaagcgcgataaagaataatttataatagttttttataaattctattggtaaaagtatctagagaaagttaattctcagatttaaaaagacgatcgaaaacttttgaaaaattgtttttgatcgcctttttgtgtgaaatgaaaacaagattctacgtaagcgtaaaataaccgagtatctagattagttttagagtaagcgtcaaaatctaagacgtctataatttgtgctcctcctcatttatacttggctcatcaagttaattgaggaggactttttaatggaagatcaacccattattcctttagctcctaatcaaattaaaaaagctaaagaagaaaataatctactgttcaagtattcaacgccggatattgaacttcacttctataaagatatgaatcaagatcttatcatgaagattttagacaaggtggtcaaagatgataaatctgagtgatcttgggcaagtttatatcgtttgtggaaagactgatatgaggaaaggaattgcttccttaggctacattattaaaagccggtttgaacttgacccattttctggtgaagtattcctcttttgtggaggtaaaaaagacagatttaaagccttatattgggacggtcaaggtttctggctgctttataaacgctttgagagtggaaaactttcatggcctgataatgaagatgaagttcaaaagctatcagctgaacaagttgattggctcatgaagggattttcgattgccccaaaaataaaagatgcaaagccgcgtgaattctattgatttcatgtggctttttcggtatccttttaaaaagcgaatgaggaggagtactgaaatggcagaaattaattatccagaattagttgcccaattaactgaaactaatcgtgaacttactaaacaagttgcacttttaactgagcaagttcaatacttgactaataagatttatgctcgctcctcagaaaagactaactttcaacctggtcaaactaatctttttgatgatgaagacctaggtcaagatgatgatggagactctccctattcccgtaacagaggttaagagctatcatcgtaagaaacacaacgaaaccaaacaagagattattgataatctcccaggtaaacgtgttgatcatgttttagaagataaaaactgtcctgactgtcatcatgaaatgcatgatattgggagttcggtaaagaaagaagtaatcttcaaacctgcagttttagaaagactggatcattatcaacatgcttaccgctgcaactactgtagtgatcataactatagcgataagattattaaagcaccaatgcccaaaacaccattagatagtgcacttggttcagcttcactgatcgctcatacgattcatgacaaattcaagctaaagcttccggcttatcgtcaagaaagtgaattaaagagattaggtcttccaattagtagacagactatgaccaactggcatattaaggtttgtgactactacttgggtaagatttatgacctattacatcaagaactacttgaagagaaggtcattcacgctgatgaaactccgtatcaagtattagaatcagagacagctaagacctattattggactttcctgtctggtcgatactcagataagaagattactacttatcatcatggtagtcgtaaagggattgaagctgttaactttttgcaagatttcgatggcttcgttcactgtgatcagtatggtggctatttccaactgaaagatgtaactttagttggttgctgggctcacgctagaaggaagttttatgaagctcaaccgcaagaatatgatgacacttcaatttctcaaaaggcacttgcctacattaatcaaatctttcacttagacagccaatgggcagaactcacaagtgaagaaagatatgagaaccgaaagaagcaacttaaacctttaatcgagaagttcattaattggtgtcataaaaagcaaagaaatgtcctacgtaactccaaattaggtaaagcattcagctacttcttaagtcacgaagataaatttagaaatgttctgcgaaatggcgatcttgttttgaccaataatatggcagaacgatcaattaaagaacttgtgatgggccgaaacaattggattttctctcaaagttttaaaggagcccaatctgtcgctatcattttaagtataattaagactggagaaagaaacgatcttgatccattgaaatatattcaatatacgcatggtgctagttaaatcgttttagttaataaaaaagtccaatcttgttagactcgacttgtaaatagtaataatagaaaagagtctgatctgattgaactgccttaagcttaagcgttttagccaccatttacaagttagttttaaagatttagtgataatttgtcggcactggtatcgtttgtatgcaccggctgagtttactcatcggcgaaatattgatcaaattaaaactacggacagtctgattttggctttacttatctggcaagctaagacaggaattgaatcacaaagaagattctgtgaatgtttcaattgtttatcacactcacgttttaatcggcgttcacgtcagctattgcaattgatttatcagatacggcaagaaatgaataaaaaggttgacctgaatggacatttcttgatcattgacagctttccggtacctgtttgccaaccaattcgcaactatcgtgctaaaatttttcgcggttatgccaacattggttataaggccaccaagaaaatttacttctatggtttcaaagttcatgtcattgttagcgatgacggttacattcttgattatgtcgtaacaaaagcatcagttcatgatgccagggagacagttgaactgctggaaaatacccatccatctaattactatcttcttggcgacgaaggctatttaggcaaagaactgcatcaacagctaaaacaaatgggttatgaactttggacaccatatcgtaaaaatatgacaggagctaaaaagcacaatgatcatcaattgatggctattcgcagaacaattgaaagcgacttttcgcttctgacctattacaatgccgagaacaatcgagcacgtagtctgataggctttcaaagccggttggaaattgcaattttagcttataatttggcttattgtctagaaagatttaactagcaccacgcgtatagttataatttacaattatcttgggtagaaatcttattgtttagaattaagaaagcttaatattattttttgtggtggtcgatgtaagtcagcaaagccaacaaaagcatcaaaaagctactctcgtaaaccgacatggttgaactctttctgtagtatgttgaccattgttaaaaaaggtgaacgcgtaaaatactaaatttttactctaacaaagtgtctgggaaaaagtttatttttaattaattttagactttcactcaaaaaaatcctaataaatcaaggtttattgataccaagatttattaggatttcttaatttctgagtttttcccagacactttatttagactattttcttaacttgtgcaccttatgggctagaaccatttctttattgcgatcttcatagatcatatccttgatgtaattccatgggattaacaaaggcgttttgctatttttacggaaaatgaagtctgcgtgtcgtctttccaagtgacgcaaatatcttttagcattttgaatcttagtatggtgttccaaatgcaatcgtggttcgaaatcgacgattttatgttaagcgttgaaaataggtctaactttatggtgccagttctcagcactagagatatgatcgctgaccttttttccggcttctacgatattctctttggttgctggacttttctgatccttaaactccgcatgtggatctagatagtagttgcccaaaccatcttgacgataaagtcgtattttcttgaatgtcttatttttcttgtccattcttacttcgataacgtcaccatttttgtgattcattaaatacatgtgatgttttctagtgtaatttgcacttttcatgatcagaaatctcacctctacattaattattctgaaacgatattataccagtattttaactatatttttgctttacgagtataaaagtttataatttttaaaaagaaatttcaattcttgagaattagagaaggaaaaaatcctaatgaaggaacttaatatattttattatgctaccatttggagttttattattggagaaactgtcaaatcttttgtgtaaatagttctttctcgtaaattgattttttaattatttatttaatcaaagtaggattctaaggtgtcctgaacctgaccaaagcctttatgaattcgattgaaataacggtcattgtagctcattgcctgaatgccaataaaagcatcaagcgactgttcagttggaaactctgccttaggcttagctttgcgcttgatcacattgttaaatgattcaatcatgttagtcgaataaattgaagctctgatctgcttgggatagttataaaagaccagcagatctggttctatgtctttcaagcttctgataacatggctgtaaaccttgccccatttggtatagaagtcatgcaggacagctgtggcttcttctttgtttgtctgttgatgcacctgtttgaattcgttcatgatcttttcacgatcgtcgacgcgtactttagcgcagatattgcgcatgacatgaaccaaacagcgttgaaaatgagctttaggataagtcctggccaaggctgttttcatgccaacaacaccatcagaaagaaaaagctcaacttgctttaagcctcgggatttcatgttttgaagcatatctgtccagacttcaatgttctcgctaggtgcaatgcagtagtcaatgacctccttgtgcccattaggcttgatgccaatggcaatatagactgcttcacgctcaaatgtttctcggcgcaaaggaaggtatgtcgcatccaaatagacgcagaaaaacttgtcgcttagcttgcgtttgtggtaagcctcaacctttggaatcatctgcttggaaatatttgatacctgagctggactgtaatggctgccatacatcttttcaattagatcggctatttccctggtggtcacgcccttggagtaaagcttgataatcatgctttccaagatatccgagtgctgcttgtagccaggcagcgtgtgctgatgaaattgaccgttgcgatcccgaggcacttgcacttcaattgggccaaattgcgtatcaactttgcggaaataagcaccatttctagagttgccagtattccagccatttctggcatagggatcatagcccagaaaggcagtcaattcagcttctaacaagttattaacagcctgttgtagctctttgcgcaataaatcatttattttgtctggattgaatagagcttgagcaaaatctttggtaaaatcattcatgaaggagttcttctttctgtatgtgtttttttgttcaaaccaatcatacgagaaaggaactcctttttctaatgtttaaagaaataaatttaaggaatcattcatccttacacaaactattttacagtctcttattggaatatgctgtgctacatatttaaacttaattaattttattatctgaaaattgaaagcaccaaaatcaagctcaagtcctgtcactattgagctttcttagacgtaattagtttttatatgatctgtttcagtgcaatttgtatgaatcgtggcagttggttaataaagtcattgattacttcatctatcttttcaaaactattctgtttaagctcttttaattctgaaattaagtagaccaatgcatctacgaatctaatatcaggtaaggattcgttcattagatagaataaatctccgattgtcttatcatctgtattttgtctttcctgccaggtcaatagatcataagttattgctgtaactgcgatatagccacattggccatcatagctttgaacttgagatttatctaaagcaagatattgcttagacgtcttaaaatatgtttcaatttgccatctacgaccataaagttggatgatttcttcagggctaagctttgtctgagtagtagctaaaaccaaatacttgttcttgtttccacggttggagacaaagacgagctttaataaaaagctatgtccatgatattgagcctcaactatgcttgaataaagataatgtttctttttacggatgtttgaagcagccaaacgatcatacaagtctttaacgctatagcggcgatggcgataaatgtaataaatctttgaactcttcttgatcatgccaagtccatctaaaccgatcttctttaaaatccaaaacattcttggagaagaaaaccaagaatcgaataagacgtatttagcttctactcctaatcgtaaggcttgtctaatcaactctacagttacatcattcatctttctctgagcttgatttctccttttaccagaaattgaacgttcatcagcagtaatgggagcagctccaatcatatttttcttggttttggttgacatcaaggcaaagttaaccggcaagaaggtattgccatcgctccagcctaaagttaaaccacgatatccgttccaatactcatgcttgtcatggtcatagactttagctagcaattcggtctttttagaaaaagaccgagccatcagcgtatcgtcaacgataaaagcaagtcggcgtcttttatcgataaatggttttaagcagccaatgagccgggctgcaatcaagcataatagtttttgccagttgattcttccatcgttaagtacattgcgagcagttctaacggaaaaacgtttgtcatccttagctctgaataaagaaagccgagcaaaatgtactgacatcagccaagagataatcatggttaatgaaacggtggatttacgcttaaaattgacttgtttagttaacttagctagaccaattagattaataaatgaagaaattaaggatttagtatcattttctgtgtcgatttgttctatactgttcattgcgcaggatctcctttactttttaggtcgacacttaaagtataacgcagagagagcctgcgtttttatttttgataagaaaaagccaagaggcgcggggaaggagcgttaatcttagctttcaagtttcagttttattattaattttgtctggcatgttttgtttgataaattacctgttcctagtcaggctttaccgttttttatttgtattccttttggtttcattattggtatattaattaagcgtttaggatcatatccattaactatcgaagaagttttaatgagtgttaagcaggaggaaaagatcaattatcacaattggtggaaatccttaaccttaggtcttatttctttagccgcgggtggcagtattggaccagaggcttcaactactgtactaggaagtggcatggttaattggctgggagatagattacgactaattgcttattcttctgattggaaatggaatcatttttgggatactatcgtttcgaaaaaacaactaaaaaaactgccaaaatttagtagcctttttaaatcaaaattgtatcaaaaagttttttgcttaattatggttatgatcggcgtggttggtgcagcaatagtctttaaattattccctgaagaaggattatttggtattcatcatcgccatattctctggcaatggcgctatagtatgtatgtaattattctattaattgtaggttggagcttcggtatgtttttcttatggagcgaaaaatggagtgattattttgctaaaaaaattactatttcaccgattattaaagcaactatatggggaatagttcttgcattacttaccttaattactagttatgccctgtattctggtgaatttcaaattgttccatttgtacaccaggcgttgcaaatctcaccattatttttgctagttatagcagtcatcaaaaccttgtctactaatataggttttagtttaggctggcgtggtggaaaaattttcccttcgatttttgctagtgtagcagttggcgcagcgattgcgcaatttttaccaattatgccagttatgtgtgtagccattacagttagtgcaagtattgcagttatcttgggtaaacctttattaacagctattttattgattctgttattaccaatagagttggctcctgtcattttagtaagtgcgtatttatctgcctgtttgacaaaagtgagctatagttttagacaaaagaataattagggaggtatttttatgaacgaaaaaaacgatgcagtaactggtgcttctttgatagagaatcaagaagaaaaagtaaaaagcccatggccgggtcctaaaggtatgattcctgtaacaagtgggcgtgctgacgatgctaatgtacataatcgtgcctacttagacaatatcttggtggagatgcgtttgcttgattcagttgagccagacttaacaactgagatttttggtaaaaaatatgcctcacctttaactctggctgcagtctctcatttgaacagggttttaccagataagacgcgtaagccaatgcaagaaaaggcacgtgcggctaagaataccaatactttaaattggattggcatggagtcaaacgaagaatatgccgaaattgtcaaagagggcggcgatacagttagaattgtgaagccttacgcagaccatgataaaattatgggcgaactaaaacaagcagaagaattaggtgccgtagctgttggaatggatattgatcatgtgcctggtgataatggtaaatatgatgtagtcgatggtattccactaggaccgatttcatttagcgatcttgaaaagtatgttcatgcagttaaactgccgtttgtggctaagggcgtgctatccgtgcgtgatgccgttaaggctagagatgctggtgccaaggcaatagttgtttcacatcaccacggccgcgttccatttggcgtgccgccactaaaagttttgccagcaatcaagcaagcactaaatggcagtggaatgaccatttttgtagatggatcattgatgactggctacgatgcatacaaggctttggccttaggcgcagatgctgtactgattggtcgcgggattctttctgaattgttaaaagacgggcaaaaagcaacagaagataagattaagaaaatgaatgagcagcttgcacaaatgatgttatatactggcgttaaagatactaagtcatttgatcctagtgtgttacattttgattaggatagaaaaatgaaatagtttattttttacagtttactataattaagtggctattagcctataataaaggcgtttaaagctatactgaatagtgttatgcttaactcggacgttgttataaggtaattatttaaaagtaattagttgtatacgaaaacatgcttagctctggtaaaagctaagcatgatgtctcataatattgagccgcttgtagattatactacaagcggttttattttagatgaaaataacaagtatttcaaaaagtgagtatctatgttttgctattatggaaatggattgatttagaaaatgatgctattgaaatttcattatgagcggggatgcaaaaccttttttaaaaagcataagaatgagcaaaagataattaagcagttaatcgatcaagcgattactaaggaattggcaactggtatgactaaagtgaagatcgctgcaatgactcggattgagggaaaatcaatttacgagtttcgcctaaatttgaaaaaagcgggttcagcgagagtcgcttttgcagtaaaggatgagcaagtactagttcttttgattacctctaatttacagaaggatagttttagtcatgaattagaaactgttctgaaaggaagtcattatgcgtttaattccaattaagcaggcagagactttgctcaaaaaaatgtgtagtaataaaagtaaatatgtagaaattaaattattaacggcaaaaaaggatcgttcaattagtgtgaaaaatgatggtaaaaagctaattttaactgaagatggctatttgaactttacgcaggaatatgaattgactgatccagctgttggccgtcatgcagttttagcggcttttaaaaaggaatttccgcgtagtaatcgtgcgtatctgattgctaaatggtatactttaactataagaaaaactatcagtgttgatcagaaaggaagtctttttatcaatgaaatatgcagaaaaatctcccgcattatgggatgccattcatcatgaagaacagcgccaacaagacgtcatcgaattaattgcctctgaaaatattgtttctgatgcagttcgtgaagcacaaggttctgttttaactaacaagtatgctgaaggatatcctggtcggcgttattacggcggttgtcaatatattgatcaagttgagcaactggctattgattatgcaaaaaaattgtttaacgcaaagtttgctaatgtgcagccacactctggatcacaggctaacatggcagtttatcaagcacttttgaagccaggtgatgtcattttaggtatgggaatggatgctggcggtcacttgactcatggatccaaggttaacttcagtggtaaggaatataagtcttacagttacggtctaaatgttgagactgaagaactagattttgatgccattcgtgaaattgctcttaaggttaaacctaagttaattgtagccggtgcttctgcgtacagccgcatcattgattggcaaaagttccgtgaaattgcagatgaagttagggcatacttaatggttgatatggctcatattgctggcttagtagcaaccggtcaacatccaagtcctgttccagtagctgatgtagtaactacaactacacataagaccttgcgtggccctcgtggtgggatgattttgtccaacaatttagaaattggtaagaaaatcaatttcgctttgttcccaggcattcaaggtgggccacttgagcatgtcatcgcaggtaaagcgcaagcattttatgaggacttgcaaccacaatttacagattatattaagcaagtcattaaaaatgctaaggcaatggcagaaacttttgctgaatcggacaatattcgtgtcgtatctggtggtactgataaccatttgatgattatcgatattactaagactggtattaccggtaaagatgctcaaaatttactcgactctgttcacatcactaccaacaaagaatcaattccaggcgatcaacgttcaccatttgttactagtgggttgcggattggtacgccagcaattactagtcgtggctttgatgaagcagatgctaagaagactgcggaaatgattattgaaattttatctgatccagaaaattccgcaacgattgctcatgttaaagaagaagttcaggcattaactaaaaaacatccaattgaataatttgtgtagcagaatttagccgtcctagttctcagctggggcggcttttgttataataaaaaattaaaaataatggagttaagagtgaaggaaacgtgattatttggaaaaattaaaaagacataaaataggcttattttcagcgattatgctggccttgaattctttaattggttcgggttggctttttggttcaggttctgcagcacaaattgcaggtccagccgcaattttatcttggattttaggtgcagtaattattatctcaattgcattgacttatgtagaattaggttcgatgtttcccgaaagtggcgggatgagtcgatacgctcaatatagtcatggaccgttattgggttttgtggctgcttgggctaactggatttcgctagtcacattggtaccaatggaagccgtagctgctgtgcaatatatgagttcttggccctggagctgggctaactggactaaaaattttattaaaaacggcagtattacttttgctggtttaggtgtggttattatttttatgctgatttttacaatgatcaatttttggtcagttaaaatcatgacccattttaccaatttgatttctatttttaagatcttattgcctactttgacgattatagttttaattgcttcaggttttcatggacaaaactttggcagtaatttacatgaatttatgccttatggtagtcggtccatctttgaagcaacttctgtttcaggaattattatgtcttatgatgcctttcagacggtcatcaatatgggtggggaattgaaaaatccgcgtaagaatattgtgcgtggggtattgatctcaatgttaattactgcggcaatttacattatgttgcaagtgacatttattggtgcagttgagccaggcatgttagctaaagtaggctggcatgggatcaactttacctcaccatttgcggacattgctattattttaggcattaattggctagtaattttgctctacctagatgcatttgtttcaccatttgggacaggggtagcatttgtagctacggcctcaagagccctagcggcaatgacacacacacgtcatttgccaaaatggttaggtagattgaatcaaaaatacttaataccacgttatgcgatgattgctgactttgttttggcggttattttagtaagcttatttagaaactggaatttactagcaacagtaatcacggcctcaactttgattgcatatttgactggtccagttacggtaatgactctaagaaagaaaagaccagatcttgatcgtccatttaatcctggttatatgaagtggctagctccagttacctttatactaactagtttggcaatttactggtcaatgtggccaacgactattcaggtgataattgttattgccttgggtttgccgatttatttttattatgaaattcactaccaacattcaaatttaaaagaacaattacatagtagttggtggatgatcggttatttgatttttatgtcacttatgtcctttgtgggcagtagcggttttggtggtcagaactggattaagtatccatttgactttgtagtaattatcattatttctctcgccttctattattggggaattaagacagggttaaagaaaatcgatccttatgctgaaaaaattgcgcaaaataaagaataagtaaaaaaactgttgggatttttggtctcaacagttttttgttcgctattctgcttcatcaagatacttatttagtaccttgaaaacaccgttgtcgttattagtaggtgcaataaatttagcagtctttttaacgatatcttgaccattagccatggcataacttaaaccagcaaatttcaacatttcaaggtcattttcaccatcaccgaaggcaattaattcacttcttggcacgtctaaataagctaaaaattcctttagccctgcggctttatttacaccttcaggaataatatccatgtagctccaaccactagttgtgacgtggattttttctgtactacggctgttgaagccatgttctaattcatgtcgaatcttgctgggatagtccattgtgatcttagtgtattggtcatcagcaggaattttattaaaatcatcaatttcgatgctattaggataaaaataatgatgggaccgcttgtattctggtggtgtactttttaaaaagtaggagtgcttaacgccactgattaaaatgttttgggctgcaccaggatagcgtgcgtgcaaatattcaataaaatttaggatgcatttttttgaaaagcttgttgtacgaataatttttccatcgcgaactaagaccgcaccattgtcggcaacaaagtcaatagaatcgataaattcgctaaagtcatcagccaaacggccagctgggcggacgctagcaataataaaatgtgccccgtgttgatgcagacgagttaaaatctcgctaaacatttgatgatcgtattgtttttcatcgttaacaaaagtaccgtcaacgtctacagcaacggccttgaagggaagagtagtcatctaattacctcactaaaatttgataccgttaacagtttaccatttcttgcaagtgcttacacaaattatttatattatgtttaacaataaatttgaaatttacgaggtagaaaaaatgacaccatggtggaaaaaagcagttgtttatcaaatttatcctaagtcatttcaggacagcaacggtgatggcataggtgacttacaaggaattattgctcgtttagattatttggaaaatctaggagttgatgcaatttggctttcaccggtctatcaatctcccggtgtggataatggctatgatatttcaaattatgaagcgattgatccgcaatatggcacgatggctgatatggatgagttgattcagaaagctaaggagcatcatatccgaattgtaatggatctggtggttaatcatacatctgaccagcatcaatggtttgtggaggcacgaaaaagtaaggataatccttaccgagactattatatttggtgtgatcctgttgatggacatgagcccaatagtttgaagtctgctttttctggttcagcttggaaatttgatgagcaaacaggacaatattatttacacttctttgcggaacaacaacctgatttaaattggaaaaatccagagttgcggcaaaaaatctacgatatgatgaacttttggcttgataaggggatcggtggcttccgaatggatgtgattgaattaattggtaaagatcccgacaaaatgatccgtgaaaatggtccgatgcttcatccatatttgcaagaaatgaacaagaatacatttggtgatcgagatgtgatgacggtgggcgaaacttggaatgcgacaccgaagattgcagaagagtactcagatccagcacgtcatgaattatcaatggttttccaatttgagaatcaagctttagaccagcaggagggaaaagaaaagtgggatttaaagccgctagacttaggcgaattgaaaaaggttttagtaaagtggcagacagagcttgattttaatcatgcttggaatagtttgttctgggaaaatcatgatattccgcgcgtaatttcacgttggggcaatgataaaaaatatcgggtgcagtgtgctaagatgtttgcgacagttttacatttgatgcacggcacaccatatatttttaacggtgaagaaattggtatgactaattgtccggtaaaaaatattgatgaagtagaagatattgaaagtgtcaatatgtatcatgaacgtctggctgaaggttatgacaaagataaactaattcatgcgatcaatgttaaaggcagggataatgctcgtcgtccaatgcaatggaatgatgagaaaaatgccggctttactaagtcaaagccatggttgacagtaaatcctaactacaaagaaattaatgtgaagaaggccttggctgatcctaattcgattttttatacttaccaagaattgattactttacgtcatgaaaatgagattgtggttaatggtgactttaagttggttcatgatactggtgatgaagttcttgcatattatcgtattttaggtactgaaaagtggttggtggttgctaacctatctggtgaagagcaacagtttacggcgaccgatcgcattaaagaaaacttgcttagtaattatgctgtgcgtaatgatctgcatgatattacgcttaagccttatgaagcatttgcagtggcaattagataagctaaaattaaaaagaacttgaattactaacttgaagatgttattctagttatcgttaatcgattaatctatgatctgtgatatgatcatggcaaaggagtaataaattatgaaacaaggtattcatccagaatttcaagaagtagttttcatggactcagcaactggtgctaagttcttagctggctcaactttgaagccatcagaaactattgactacgaaggcgaaacttacccattagtacgtgttgaagtttcatcagattcacacccattctacactggcaagcaaaagtttgctcaagcagatggtcgaatcgaaaagttcaacaagaagtacggcttgaagaagtaaaccttttatctggtggaagcagtcccattggggctgcttttttcgttagagattatttggcagaatgcatgaaagacagtataatgttttctgtataaaaatgtttttatgggagtaaatattcaatgaaaatgcaaatggcggaaattgccaaggctttaaatactacttgtgaaggtgacaatcaaactgttattacttctgttgcctttgactccagaaagatcacagatggtggattatttgtaccacttgaaggtgaacgtgatgggcacgaattcatagctagtgctattaataatggtgcttctgctactttatggaaaaaggggcatccgaacaagccagaagatattgcggttattgaagttgatgatccacttgctgctatgcaagagcttgctcgctattatttgcgtaaggttaatccaaccgtagtgggaattactggttcaaatggtaagactactaccaaggatatgattgctgctgttttgtctaaacgctttaatgtacataaaactcaggccaactttaacaatgagattggtgtgccaatgaccattcttgagatgaagccaaatactgaaattttggtgcttgaaatgggaatggacagaccaggtcaattgcatcatttaagtgaattaacccatccagatgtggccgtaattacaatgattggtgaagctcatattgaattctttggcagccgcgacaagattgcagatgctaagatggaaattactgactttttgcgtgaagatggcgaatttatcttcaatggggatgaaccattattgcaagaacgtgctgagaaattggatcaagctaaagcaacttttggttttagagatgaagatacagttcatgcaactggctttaagagttatatgcatcatgctacctttacagttaatgattcagagcaaaaattctcaatcccaatgattggtaaacacaatgtttctaacgcaatggccgcaattagtgttggtcgtcattttggtgaaagtgatgaggaaattgcctcatcattgtctaactttaccccaacggctaatcggatggagtgggaaaaaggcgatgctggcgaaagcatcatgagtgatatctataactcaaatccaactgctgttagagctgtattgactagttttggccaagttgaagtaaaagatggtggtcgtagaattgctgttttaggtgatatgcttgaattaggtaaaaagtcgccggaattgcatgctggtcttgcagatacaatggatccccagattattaacgaagtttacttatatggctctgaaatgaagaatttatatgatgctttacaaggcaaatatgagccagaacatttgcattattatacacaagaacaaacagatcgaatgattgatgatctgaagaacgatattaagtcggatgacattgtagtattgaaaggttcgcatggaatgcacctagaaaatgtcttagcccgactgagataggagaaaaatttttttgaaattttcagaattaggattaaatgatgcgcttcttaaagcgattaaacgttcaggctttgaagaagcaactccaatccaagaacaaactattccccttgctttgcaaggcaaagatgtaattggtcaggcccagactggtaccggtaagacagctgcgtttggcttgccaattttacagatgatcgacaaaaaagaaaaagcaattcaagcggttattattgaaccaacgcgtgaacttgctattcagacgcaagaagaattattccgtttaggtcgtgacgaacatgctcatgttcaagtggtctatggtggagctgatatcggtcgtcaaattcgctcattgaaacaccatgtaccatcaattttagttggtacgccagggcgtttgcttgaccacttgaaacgcaaaactattaatttagatcaagttaaggctgtcgttctagatgaagcagatgaaatgctcgatatgggttttattcaagatatcgaaagtattttgaaatatgctaagaaccgacaacagacattactctttagtgctacaatgcctaagccaattttgcggataggcgaaaaatttatggatcacccagaaattgtccgcattaaagctaaggaattaactgctgatttgattgaacaatattttgttcgtgctaaagagtctgaaaaatttgatattatgtgtcgactaattgacgtgcagggtccagatttggctttagtctttggtcgcaccaaacgtcgcgtagatgaacttacgcgcggtttgcaagcgcgtggctacaatgcggcgggaattcacggtgatctatcgcaagcgcgtagaatgtcagttttgaaaagatttcgtgaaggtaagctagatattctggttgctactgatgtagctgcccgcggacttgatatttcaggcgtaacccacgtttataattatgatattccccaagatccggattcatatgttcaccgtattggtagaactggtcgtgcggggcaaaatggaatctctgttacttttgttacgccaaacgagattggctatatgagaaccattgagcaattgactaaaaagaagatgtcgccgcttcgtccgccaacagatgatcaggcattacatggtcaattaaagcaagcaaaaattgaaattgaagatttgatgaacggtgatttgggtaaatatacccaaggggcaagtgagctgctggataactattcagctctcgacttagttgcagcctttttaaagaacttggctaaagatgaggttaaagtcaagattaccccagaaaagccgttaccatacaagggtgatggtcgccgccgtcgtggtaaaggtcatggccgtagcaataataatcatggacgcgataaccaccgccgtcgtagtaacaataattcataccgccaaaatggaaaccgcggtaagcgtggtcgtggcaacggacatgaatttgtaatcaagaataagaaagattaggattttatcttaaaaagggaagttgtaatttttacagcttcttttttgtattataatgatgtcattgtgtgaggtgaaaataatgattaaaggagtaggaattgactcgattgaagttgaacgagttaagaagatcgtggacaagggggatgcttttgccaaaaaagtattaactcccaaagaatttgatcaatatcaaaaaatggcaggcaaacgtaaagttgaatacctaggcggacgcttttcattaaaggaatctttttctaaagcaatgagaacgggtctgggaaagtatattggttttcaagatgtcgaaactttatgggatgatttaggtcatcccgttatgacttcaactaagtttgatggaaatattttcccaagtatcacacatgataatcatgaaattattacatttgtagttttggaggaaaaataaaaatatggttccaggctatcaccgtccagccgttgtaaaggtaaatttgggcgcaattagaagaaatataaaaaacgaaatgaaacatcttgcaacagggcaaaagatgttagctgtagttaaggccaatgcttatggtcatggtgcagttgaggtggctaaaattgcgattgaggaaggtgcagcaggcctttgtgtagctattttagatgaggccttgcaattgcgtcatgctgacattgttaagccaattttagttttgggagtagtttctccagaatacgctccaattgcggccgcaaacaatgtttcattaacgattcctaaccttgaatggctaaaggaagcagaaaagtaccttgaaaaagagcagttacagttgaaagttcatattggagtagattcaggcatgggtcggatcggctttaacgaagatgaggattttattgctgctaataaattcttacaaaataacgataatttctacgtagagggtatgttcgcacactttgcttctgcagacagtgctgatgatacttactttaagcatcaggtagaaaaatttgctcatatgagaagtttgttgacagttaagcctaagtggattcacgtagacaataccgctgccagcatctttaacaaggatgtgcctagtgattgtgttcgttttggaattggcatttatggtttgaacccatcctctaatcctgatagtcctgacttgaagtcatcaatttcgcttgaaccagcattatcatttgagagtgaactaactcatgtaaaaactattcatgaaggtgacggagtaggatatggttctacctttgtagctgatcaagatacaattattggaactgtgcctgttggctatgctgatggctttattagaaagtttcaaggctttaaagttaaacttggagacgaatactgtccaattgtcggccgaatttgtatggatcaatttatggtcaaaatgccaaagaaaatgccgttaggaactaaggtagtcatcatttccaatgatccaacagcaccaaataatattaaggccgccgcagattatgttgatactattcactatgaagtagcatgtttgttaaacgatcgtttacctcgtgtttactatgaaaaataagttaggcaataaaaaaatgcttctagaacaaaaatctagaagcattttttggtagatcagttttttaatccttaacagggtgttcaataaagacacctggattttcatcactcataatagtcatgccggcttgcaaatcttcgatttcagaaactacgaaaccttttttttgtaacttatcaacaatcgttctcatggtaatatctgagacaccagcggggagagtaaagagtgttcttctaacaaaattaccttcgagttcgccagcagctgcatcaagtgtcattacactagacatattagtgtgcttagacacaatcttggacatcttgatcaagttaccacgtgtattgtcagataaaacggtcaaaacgtatgaaccatttttaacatcccacgcatctgacaacatatcaagcattcttgagtgagtaagaataccataaaaatgattatcttcatcaaggacagcaatataaggcaagtccttaatgttgaaaaataccttgaagaatggtgaattgaccttaattgtcttagtggcattcttaagtaagtaagttactggtagattcatatcgccaccttgtgacttatgacggtagatatgcatcttataaatgttaccacggaaaatagtaccagtatcgtcaacgattggcacacatctgtagcctgaatcttctaaaacttttaaagcttctgctaatgtggctttttcattaactgttgttaaataatcttttttaataactaaagatttaataagcatgagttcgcctccgaaagtgagaaatgtttcaagtaattatagcatagttgatgagttaattaaatattaattaaagttcatctgaagtaacaactatattttaacaatagttagacaaataaaaaagcatctctaaaaaagagatgcctttagatgaaacaagttttagattattgacgaaccttaacgccagtttccttaaatgccttgtccataaccttcttcaattgatctgcagaagcagtcatcaattcttgttccttgtcacttaatggcatttcaatgatttgttcaagacccttacggccaacaactgcaggagtaccaatgtgaatgtcatgtaagccatattgaccgtccataggaactgaaagtggaagtacacggtgttcatcgttcaagatagccttagcgatcattgctgaagcagtaccgattccgtagaaagtagcacccttcttgttaatgatttcgtaagccatgttagcaacttccttgtggatgtcttcaagcttagattcatccataccgtgtgccttaacccagtcactaacctttacgccaccaacattgttgtagctccatgctgggaattcagtatcaccgtgttcaccaagcatgtaagcattaactgaacgtgggtcaacatgttccatttcaccgataaccttttgaagacgaccagtatcaagtgaagtacctgaaccgataacacgatccttagggaaacctgacattttccaagttgcgtgggttaaaatgtcaactgggttagcaacaactaagaaaataccttcaaagcctgattcaacaactggttcaacaattgatgataaaatcttcaagttcttgttaacaaggtcaagacgagtttcgcctggcttttgtggagcaccagcagtgataactactaagtctgcatccttacagtcagggtagtcagctgcatagatattctttggtgaagtccaaggggtagcatcagctaagtcaattgcgtcaccttcaacgtgttccttagcgatatcaataatacccaattcttcggcgataccttgttgtaccattgagaatgcgaaggttgaacctacagcaccatcaccaacaagaataactttacgaggtctttcatctcttggcataaataaaaatctccttttttattagtgatatttttaacaaaatgaattataccatgatagcaagcattaataaaattattatttcctaattgtgctattatatgtaagattgtgtgcatagtgaggagtaaaaataatgaagataattgcaggtttaggtaatccaggacaaaaatatgataaaacaaagcataatactggtttcatgacaatggatcattatttgaatgaaaagggtttgtcactggataaagataaatttgaaggtcattggactaagcaaaaaataaatggtgaagatgtaattttgcttgagccgcaaacctttatgaatgaatcaggtcgttcagttagtcaagtggctaacttctttaaggttgatccagcagatgtgctaattattcaagatgatatggatatgccaattggtaaaattagaattagagctaatggcaaatctggtggacataatggaattaaaagcatcattcgagatttagggacggaaaagtttaatcgtttgaagattggtattcgtcatccgaaaaatgcaacggttgtttcatgggttttgacaccatttaatgatgaacaacaaaaattgatggatgatgcatttgcgataagtgtagatattattgacgactttatcagcggacatggtagtcaatatttaatgaataaatataattaaaatgcgtttaacagagattttagataaagatcaagatttaaataattttatttcaaaaacaaaacaagtaaaaaattcactaatcactggcgctaatgccggtgcttttagtctattgctaaaacagataacaactaaattagcagctccacttattttaattgaagaaaacgaaagtaaagcacaaaacttatatggtgaactcagtgccattatggcagatgaaactgtgcaaatttttccagtagatgctacaattgcaacgcaaacggcagttagttcgcctgatgaactgagtagccgaattcaggcacttaattttttgttaagtggtaaggcaggaatagtggtaacaacgccgcaggggctgcaatacaaactgaccaatccaactgattttacgcaggcaaagcggagttttgagccaggtcaagaatatgaactaaaagaactcaatgaatggttgcttgcttcagggtatcagcgtgattctttggtagtacggccaggcgaattcgccatccgtggtgatattttagatgtttatccactagatcgagaaaatcccgtgcgaatcgaattctttggtgacgaaatagatacaattaaggaattcgatttagctagtcaacggagtcaaaaagagttagacaaagtagaagttgcagcagctcaagatcgagtttttactaaggatgcaattgcggcagcggctaagaaaattgaacaagatatggccaatgcaccagctcccgctaaagctgtcaaggaccactttgcggcagttcttgatgaattaagcgatggcggtttacctaaaaactatgctttcttaattgactatttgcttgaaatttctagtagtttactcgaatatttgcctaaaaatgggcagattttatttgacgatttgcctttaattaatcaagcggttgaaacagttgataagcaaaacgctgcttttattaatgatgaactaaaaactggtgcaatgttgccagggcaaagcttgcggtcagattatacaaagattctgagcaaagataagcaccatcgtatttatttctcattgtttcaacgaagcatgggacgactgcgattaggccagatgctcaattggtcaacacgtgagccagaacaattctttagtcaaatgccgctgattaagtcagaattagaatcttatcaaaaggcggggcaaaccgtcattttacaggctgataatgaaaaaagagcacagcaaattgatcaaacaatggttgattttggcttaaatttaccaattgttggtgcagacgaaattgttgaacaacggacacaaattgtagttgatggctttgttagtggctttagtttaccaacagttaaattggtatatctaacggagcgtgaactatttaataagcgcccacaacgtaaaaaaagaattaagacactggagaatgcccagcgtttgcgcaattatactgaactgaagccaggggattatgttgttcatgttaaccacgggattggtcggtttgaaggaatcaagactttagaaaataatggtaccaagcgtgactatattacgattacctaccagcatggtgatcagctttttgtaccagcagatcaattaagcttagtacaaaaatacgttggttcagaaggtaagacaccacatattaataagctaggtggtagtgagtgggctaaaaccaagcgtaaggttcaatctaaagttgaagacattgcggatgatttgattgagctttatgccaaacgtgaatcagaaaaaggctttgctttttcacctgatgatgatctgcaaaaacaatttgaagatgcctttccttatccagaaacacctgatcaattgcgatcggttaaagaaattaagcaagatatggaaagctcgaagccaatggaccgtcttttagtaggggatgttggttttggaaaaactgaggtagccttacgagcagcttttaaggcaattcaggataataaacaagtagcctttttagtacccaccactattttggcgcaacaacactatgagacgattcaagatcgcttcaaagatttcccagtcaatactgctatgctatctcgttttcaaacgccagttgaatcaaaggaaattattgaaggactaaaaaatggcaagatagatttggttgttgggactcaccgtattttgtctcaagatgtaaaattcaagaatctaggattgttaattgttgacgaggagcagcggtttggcgttaagcacaaggaaaagttaaagcagttgaaggcaaatattgatgttttgacattaacagctacgccaataccgcgaacgcttcatatgtcaatggtaggtgtgcgtgatctctcagtaatggaaacgccacctcaaaacagataccctattcaaacttatgtgatggaacaaattcctagtgtagtaagggatgcatgcttgcgtgaaatgcaacgtgatggacaggtcttttatttacataatcggattagtgatatcgatgaaactgtcgaaaaactgcaggaattgatgccacaggcgcgaattgcagctgcccatggtcgaatgagtcagaatcagttggaagatattctttatcgcttcctgaatcgcgagtttgatatcttggttacgactacgattattgaaacaggaattgatatgcccaatgtcaatacaatgatcattgaagatgctgaccactatggtctaagtcagttgtatcaattgcggggtagaattggccgtagtgctcgtttggcttatgcttacttcttgtataagccaaataaagttttaactgaggttggtgaaaaacggcttgatgcgatccgtgacttcactgaactgggttctggtttcaaaatagcaatgcgtgacttatcaattcgtggtgctggaaatatgctgggtgcacaacagcacggctttattgatagcgttggttatgatttgtactcacaaatgctggctgatgcaattcaagaccgtaaggggaagacaacagtcaaaaagtcaaacgcagaaatcgaccttggacttgaggcttatattccagattcgtatatcggtgatcaagaagaaaaaattgaattttacaaaaagattaaagccgtctcaagtcaggaagaattaggtaaaattgaagatgaattaatcgatcgttttggtgactatccaacggccgtcgagaatttattagctgttgccggtctaaaggttgatgctgacatggctcaagtgctcaatgtggttaaaactgacgataagattaaagtggaatttacgaatgcagcttcacgcgaacttgagggacctaatatttttaaggcattggagcatgtaagcttaaaggctcgcattagtatgaatcaagaaaaaagaatggttgtcttgctattgttgccggataaaatgaagaatcgtgttttattcaatgaactggcaatctttttacaggcagcaagcgacattgtacaaaggtaactgtaggagaaaaatatgaggattgataaatttttaaaagtttcacgattagttaagagaagaaccgtagctaaagaaatggctgatcaaggtagaatcaaagtcaatggtcgagttgtaaaatcaagctacgatgtaaaaattgatgatattattgaagtaggttacggcgccaaaaccatcaaggctaaggtgttaaatattcgcgagaccacgaaaaaagcagaagcaagtgaactgtacgagctagttgattaatgacttttgattaaatcgttgttatacttgacttagtatagttatttagtaattaggggattaaacaatgaatcatggtccacgtatatataattcgttgagtccagaagagcagagggcgcgtcttagacgtaaacaggctaaactagagaaagaaacacaccgcaagcggttgaacgtaattatggcagtttttgctatcattttcgttgctttaggtgtacagattgcaatcaagatttctcaaactggacgactgaataatcaagtacaagctgaaaaacagactttaactaaagtaaaaaataagagaaatgacttagaaactgaaaagcaggatttgaaggatccaaattatgttgctaagctgattcgttataaattctattattctaaatcaaatgagaagatttataacgtgcatgaaagaaatgatgataactaatggaaaagtatcaagctggtaatcgggtgactggtgtaattaataacattactgacttgggcatctttgttactttacctaatcggcattctggtttggttcatcatagtgactttggcaataattggctacgcgaacgtcgtcgttatcatgttggcgatgaagtgcgcgtggttgtggtgcacatccataaagggagatttaatttatcgatcactcgagtgaatgatccggaattagttgaccatgataatcaattttctaagacaaagccagctgattttgatcaagtcctgaatcaaacaacgcgggatgctaaagaagaaattgaaaagctaaagcaagtattaactgagaattaagggatggtccgaaagggccattttttgttagaaaaataatgaaaattaatgatttttttgaacaacatcagattgacttaaaggataaaagactattagtagccgcaagtgcgggaccggattccatggctttactagatatgctagttaatttgcaaaaacaactaagttttactgtttttgcggcacattttgatcatcaattgcgtgcggatagctcatatgaagtagaagttttgcaaaattattgtgctcaaaagaagatttgcctgtttaatggcaagtgggataaacatgatcagccccaaacgggaattgaggcagcggcgcgagaggcacgatatcattttttgactaatgttgctcatagcgagcgaatgaactatttattaactgcgcatcatggtgatgatttgctagaaaatattttgctcaaatttattcgctcgggaaatcctgaagagatgaatagtttgcaagatatcggctctatgcatggcgttgttttgcttagaccactattagcctatagtaagcaagaattactcgaatatgatcaagagcgtgaaattgactatgtaatagattcaactaatacggaggatgagactgttcgaaatcgactgcgtcatcatgtggtgccattattaaaagaggagaatcctaatttaattagtaatgcactgcgttttagtgaaaaaatgagtcaattgacggatttggcggatgagcagttgaatagtatgagaacggttgagccatttttgggtgcttggcgaattaaaacggacaacttaaaagatttatctacagaagaaaaaaatattttttggcaaaagataatctggcaaaaatatcatcgccgggtaaatgaaaatttgggcaattttgaggtgattgattatcaaggttatagttatttagttgaaaataagccacagaaaattgtgcagccatttagtatcgaactgaatcagcaatttgaattcaacggagcttattatttactaactactgataggcaagctgatttgaaagaaataggaagcttttggctggaaagggatgcacattttactgcgggaagtctagtacctgctagcaaattattgttgaaaaatggtcaacgagttaaggcgaaaaagaaatttgcagaaaaggcaattccctttgccttgcgctcttgctgcatttcaatttatgctgaaaatgaacctgtttttgtagaaaaatgttatcaaaaacaggactttatcacagatggtaaacattatttcctatacatttattaaaaagtcttcaaaataggtgaaaatgttagtggttgcaagctaatttgtgatagaattttaaacgtataatttaaagactttgcggaggttttttatgaagaataaccggaatcggctgctttcaaacggccttttctatatagttgtgttccttctgctcctatggggaatcaactgggcactcggcggctctaacaatagtggtagctcagagaatatcagttactcacaatttgttaaagatttgcgtcaaggcaaagttaaaaactttagtgttcaacctgctaatggtgtttacactgtttcaggtagttacaagactgcacaaacaacaaagaatcaatcaaataatagttttgatttctttagtaataattcaagtagaaaagtttcgcgcttctctactaccatgttacagaatgattctaccgtttctaacgtgcaaaacttggcacaaaaaagtaatgctcagatgacaactcaaggagaatcacaatctggcaattggatttcgaccattgtcatgcttgtgccaaccgttttgtttatcgtcatgctttggatgatgatgaaccaaggtggcgctggacgtggtggtggcggcggaataatgaatttcggtcgttcacacgtcaagccagaagatccttctaagaataaggttcgtttctctgacgtagccggtgaagaagaagaaaaacaagaattagtcgaagtagttgaatttttgaaagatccatctaagtacactaagttgggtgcaagaatcccatccggtgttttacttgagggtcctcctgggactggtaagactttgcttgctcgtgctgtagctggtgaagctaacgtgccattttattcaatctcaggttcagacttcgttgaaatgtttgtcggtgttggtgctagtcgtgtacgtgacctgtttaacaatgccaagaaaaatgcaccaagtattatctttatcgatgaaattgatgccattggtcgtcgtcgtggcaatggcaccggcggtggtaatgatgaacgtgaacagactttgaaccaattattggttgaaatggatggttttgaaggcgatgaaggtgttattgtcattgctgctactaaccgttcagacgtcttagacccagctttgcttcgtcctggtcgttttgaccgtaaggtattggtaggtcgtcctgacgttcgtggtcgtgaagctattttaaaggttcacgctaagaacaagccacttgcacctgatgttgatttgaaggaagttgcccgtcaaactcctggctttgtaggtgcagatttggctaacgtcttgaatgaagccgcattagttgctgctcgtcgtaatggtactgagattactgcatcagatattgatgaagccgaagaccgtgtgattgccggtccagctaagaaggatcgtttgatttctgaaaaagaaagaagacgtgttgctttccacgaagctggtcactcaatctgtggtttggtcttaagcgactcacgtactgtacgtaaagttactatcgtacctcgtggccgtgctggtggttataacatcatgttgcctaaagatgatcaattcattttgactaaaaagcaattatttgaacaaattgttggtttgatgggtggtcgtgcaggtgaagaagcaaccattggtgataagtcaactggtgcttctaacgactttgaacaagctactcaaattgcgcatagcatggtagttaactatggtatgaccgaatccttaggtatggttgagcttgaaaaggaaggcgaaagcaatccttacggctttaagccatatagtgaagcaacttcagctaaaattgatgaagctgtaaagaagattttggatgaagctcatgctaaggcccttgagatcgttaaggacaacaaagaaaagcatagaatcattgccgaagctttgctcaagtatgaaaccttgaatgaaaagcaaattatggccttgtataagaccggtaagatgcctgaaaaagacgaagatgaatatccgagtgaatcaaaggcttcaacttatgaagaagctaaggctgctgcagagaagcgcgaagttgaaaaggcagaaaaaaaggattcagatcaagcattagctgatcaagaaaaagataccttggagactccatctgaaaagaatcatgaagttgaagaaaataatcctgagaatcccgaaaaggatcaatcagaaaatgaaacttcaactcaagatactcctgcagatgatgagcataaagacaattaaataaaagtagggcctgtcacaggctctatttttttagaaaagaaggataaaaatgagtgattatttagtaaagtcaattgataagactaaaaacttacgcttgttaaccattaccgctaagggtgtagtgagtgaagcacaaaagcggcatgacttgtggtcagcttcagctgctgtgcttggtcgtactttagtaggatctcttttacttgctggtgcagaattgacagataaggaagaattgacagtccgtttattaggcaatggccctgttggtccaaccatcgtgacagctacctccgatttgaaggtaaagggttatgttaagaatccacatattgctttaccacctaagaaaaatggtcatattgatgtgaaaaaggctgttggacaaggatggtttgaagtaactaaggaccttggcttgaaggaaccatacacaggtcaggtaccaattgtttctggtgaaattgctgaagattttgcttactatttgactaagtcagaacaaattccgtcagctgttggtttgtcagtatttgttaatccaaataattcaatcggtgaagctggtggctttatgttgcaagcacttcctggtgctagtgatgctttgatcgatgaaacgattaagcgaattgatgcattgccagcactctcaacttcatttttggatggaatgacaccagaagacttagcacgtaaaatcttaggaaccgattgtaagattcttgaaaaagatgatgtagcctttaactgtgattgttctaaagaaaagtatgctggtattttggaaactttgaagagcgatcaattggaagcaatgattaatgaagatcatggtgccgaacttacttgcaatttctgcggtaacaagtatcattattcagaagatgaattgaaagatattttagctaaaaagaacaaagataaagattattaaggcaaataaagccctaaggttttaaccagcggggcttttttgatatcataatagggtaattttgaaaggatgatttggtgaataacagctggaaaattcgcgatatcaccattccaaaccgagttgttgttgcgccgatggcgggagtttcaaactctgcattccgcgttgtctgtaaggaattcggagcggggctggttgtctgcgaaatgatttctgatcatgggatcatttatggaaataaaaagacattaagtatgatggatgttgatccgcgtgaacacccaatgagcattcaaatctttggcggaagcgaggaaactttgcttcaagctgctcaatatattgatcaacataccgatgcggatattattgatattaatatgggttgtcccgtacctaaagtaacaaagactgatgcaggttcgaagtggctacttgattcaaacaagatttatcagatggttcacgcagtagtgcagaacgttaaaaagccggtttctgttaaaatgagaacaggctgggataaaaagcatatttttgctgtagaaaatgctttagctgctcaagaagcaggcgcaagcatgattgcgatgcatggtagaacacgtaaacaaatgtatcaaggtgaagctgactgggaagtattacatgatgttgcccaggtgctagatgtgccttttgtggctaatggtgatattagaacacccgaattagctaaaaaagcattggatgagatcggttgtactgcagtaatggttggtcgcgctgctttaggtaacccttggattttgaaagatatggtacactatctggaaactggtgaaaaattgaagccgcaaactgttcgtgagaaggttgaaacggctaaacatcagcttcacgcacttgttaaaattcacggtgaaaagcgtgctgtaccagaatttcgtcagcaagccgcgtattatttaaagggaattccccgttcagcccgtactcgtgctaaaataaatgaggtctggacgcgtcaagaagtatatgatttgcttgataattttgttgacgagtatgaaaaaagagaagaagctcgtgctgcacgacgcgcgacaatgaacaaataaatggaggaaaagtaaattggcaaagaatgaaatgaatgaccaattaatagttcgtcgccagaagatggaagaattacgtgaaaacggaattgaaccatttggtcaaagaaaatttgatcgtcaagatttggcaagtactttagaagaaaagtatggcaacgaagataaagaagaattaaacgctgatatgcctaagaccaagattgcaggtcgtatgcttgcaaagcgtggtaagggtaaggttggttttgctgatctttacgaccgtactggtaagattcaaatctatgtacgtaaggatattgttggcgaagataactacaagatctttaagaaatctgatattggtgatttcttaggtattgagggtgaagttatgaagactgatactggagagcttactattagagcccttcacgtaactttcttatcaaaggctcttcgtccattaccagataagtaccatggtttaaaggacgttgaggcaatttatcgtcaacgttaccttgatttgattaccaaccatgatagttacatgcgttttgttcaccgtacccaaatcattcaagctattcgtgactacttaaatagtcaaaacttcttggaggttgaaactccagtacttcacaacattcctggtggtgctgaagctcgtccatttattactcaccacaacgctttggatattaacctttacatgagaattgctttggaacttccacttaagcgtttgattgttggtgatatggaacgtgtttacgaaatcggccgtgtattcagaaacgaaggtttggacactcaccacaacccagaatttactgaacttgaaagttacgcagcatactgggactaccatgatgttatggatgaagctgaaggtattatccgtgctgcagctaaggttgtttcagatgacggtaagatcacttaccaaggtactgacattgacttaggcaagccattccgtcgcgttcacatggttgacttgatcaaggaaaagactggcgttgacttctggaagccaatgactcttgaagaagcaactaagattgcggaagaccacgacatccacgttgaaaagttctggaaagttggtcacattattaacgccttctttgaaaagtactgtgaagaaactattgttgacccaaccttcgtttacggtcacccagtagaaatctcaccacttgctaagaagaatgctgacgatccaagatttactgatcgtttcgaaatttacatcatgggtgaagaatacggtaacgccttctcagaattgaacgatcctgacgaccaacgtgaacgtttcgaagctcaaatggaagaacgtgaagcaggtaacgacgaagctgacatgatcgatgaagattaccttcgtgctatggaatacggtatgccacctacaggtggtttgggtatcggtattgaccgtttggtaatgcttttgactgatgctccagctattcgtgatgttcttttgttcccaacaatgcgtccagaacgtgttgaaagcgtagaagctgaagttaaggctgatatggaaaagaagaataaagaaaataagtaatcttataaattaaaaaactcttatctatgttttaagcatggataagagtttgtgtttatatattttttaattgagaatcattttttcatcagagtattttttaggatcatttaaatcccattgctgatatctaacttcttgacacttaaagcctaattttttgtaaagctttttggccttagtattttctgcaaatacatcaagactaactggtcgactcatgtatctcaaagctgtcgttgctaaagcatacccgatacctttattttgatgaattggatctacataaatgtaatccagttcttggggatgaactgcaacgaagcccaatatgctgtcagcatcataagctacataaattttgcaggagaaaaaatcatccttatatggagctgtctctaaaggtatgaagtatttttccgcaccaccaattgttagctcttctttacgactaacgtcgtgaatgcgacatacttcagcataatcgtttggttgatattctctgatattaaattttggcatgtttttctcgcttcctaatattaagattttgatttagaaagcaatagtacgtaatctcatgtgaaatctcctttaattaaattgaagatattatagcaatttttttaattcggtacaataactaaaattaacttagttaaaaacagataagtaatattttttcaaaaagtatttgcaaagagaataatctttgctataataatttttgtatcgcggaagtagttcagtggtagaacatcaccttgccatggtgggggtcgcgggttcgaatcccgtcttccgctccaagatgaagagctcacgaatgtgagctttttttgtgcctaaaataaatttatcttttttgataaaaaggtcttgcaaagaaaaatgtatttgctataataatatctgttgtcgcggaagtagttcagtggtagaacatcaccttgccatggtgggggtcgcgggttcgaatcccgtcttccgctccaagatgaagagctcacgaatgtgagcttttttgtgcctaaaataaatttatcttttttgataaaaaggtcttgcaaagaaaaatgtatttgctataataatatctgttgttgcggaagtagttcagtggtagaacatcaccttgccatggtgggggtcgcgggttcgaatcccgtcttccgctccaagatagaaggctcaccaagtggtgagtctttttttacgggaaatagctcagtttggtagagcgctacgttcgggacgtagaggtcgccggttcaagtccgattttcccgatatacaagctatccgtttgggtagcttttttctttttgttataatatcttttaaaacttaaagggagattaaaaatgacggcaactactgaagaaaaatacaaattattagtggagcaagctagagctttgattgagggagaagatgattggattgctaatacagctaatttatctgctcttttgtttaattcgttaaatgatgtgaattttgcaggtgtttatcgctatgaaaatgatgaactgatattaggtccatttcaggggatgccagcatgtgttcatattcaaatgggaaaaggtgtttgtggtacggctgcacaagcaaaaacaacgcagattgttaaggatgtacatgaatttgctggtcacattgcttgtgatagtgcttcaaattcggaaatcgttgtcccaatttttaatcagggaaaactttggggcgtctttgattttgattcgaccaagctactaagcgtataattttttacggtaagttgaataaataattaaaaaagcccaagtcctttgaatttggacttgagctcaaacaaaaagaccagtagtctgatgttaagaacaaaaaacacattagaagctggtcttttatgaattcaattgtaactgaaatcgcaaatattataaagtctgaagataattatattaagcgtgaaagaaaaataatctgtttcttcttaaacctgattaaggaaatcatggccttggctttagctaaagttgatgatgaaatgattaccaaggttaaagcacagggctatcagattgataagaagaatgagcgctcaatcaatatggcttttggcgaagttaggtatgtcagaagaagatatgtctgcccaggcaaacaagcaaggtatcccttggatgaattaatgggctttgacaaatacaagcgctacagtattttagcagtcaaaaacatcttagaagtaagcagcgttgccacttatcgcaatactgctctagcagtcaattgcctgtctggctttaatattagccatatgcaggtgggcaatttggtaaaaatggccgggaaaaatattaaagcgggccaagaagcagattcaagatatgatgccgcaggcactaagaaaaaggtcccagttttgtatcttgaaggcgatggcgtggtgatcaaaggcactaaaagccggttggaatttcatcgctatcaggtctgtgaaggcattgtcaatataagcaagaaacgcagaaagcgaatcaatgccaaggaatttgtttctttaagccgacttgatgcgctgaacgaagccaaggagtacctggccaatacttatgatctttctgatactgtaattcttagcaacgccgatggcggtgctggatatgccaaaacagacttcgatgacattgtagggctatgcaagcgtcatgagcatttcttggatgtctttcacctaaataagaaaatcaaagaaaggctatattttgcgcctgacctgcaaggcaagctgatttctgctttggaatacaaatacagctatgacaaagttaaaactatcctaaccactgcagaaagccgactaattgatgaattgaataccgagctcaatcatgattatctggggcgcctaaggaattatattgatcgtcattgggacgatattaagccgtttaagaaacgaaaactgactgtgactaaagccattggctgctgcgagagcaaccaccgcaagtatacctaccgtgttaaggggcaaggcaagaaatggtcaaaatctggagcagaaggcatgcttaggatcttaagctgcatcaagaatcgagagctggaattttggcttagcagcgagtttgaagattcagaaataactgtattgactgaacaggaattaaaagcagcggcccgtgacagcttaaagaagcgtcatgaagttcatttaggcatccagcatggcgcattaaccgcacaggtagctggcaatagttatttaagcaagctaagcagaaatttaagtcatataaatatttaagaaattaaggttagactaatggtttaaaggctaccgcaaaaacattgacacttacaccaagctagctaattttgacgaaattgataaaaagtatttaactgaaatagcgaaagcaatttttgcgtaattattagaattggacataatgaagttgaagataagtcaaattgttttacttactgacaaaagaaaagtaaaataccataacgtattttaaagggtggtgtttgtatggaaaattcatatagtaagagcgttaatcaagtattgaaaattgcacgtgaacaagcacaaaattttcatcatcgcttgattggcacagaacatgttttattggctctagtaattgaaactgacggtgaagcaggaaaaatcttgcgttcatggggattaacaccaactgcagtacgtgaagaaattgaacgttatacaggttatggctctgcccctaaggcaagctacatggaaatgtcaccacgtttgagtttagctttggattatgctagaagacgagctaatgacgatggagttaaggaagttaacactaatcatgttttgctgggaattactgcaagtgagcaggttttatcagcaatgattttgaaaaacttgaatgttgatattcctcgtctgcagcaggatgttgaagacagtttgagtcaagaccaagactttggtgattcagctaattggctgggtgatgataacacgacgactggtcaaaagaagcgcaagagcactactcctaacttagataaggtagcggttaatttaaatcaacgtgtgcgtaatggcgagattgatccggtgattggccgtgaccaagaaattaagcgtgtgattcaaattttgtctcgacggactaagaataatcctgtcttagttggtgaaccaggagttggtaagactgctgttgctgaagcgattgcaactgagattgtcaacaaaaaagtgccacaggatatgcttaagaaacgggtaatggccttaaatttaggtagtttagttgctgggactaagtatcgtggtgagtttgaagacagaatgaagaaaatcctgaacgaagtcaccaaggatggcaatgtcattctctttgttgatgaaatgcatactttaattggtgctggtggtgctgaaggtgcaattgatgcttctaatatcttgaagccttcgcttgctcgtggcgatattcaaatgattggtgcaactacttttaatgaatatcaaaagtacattgaaaaagatcaagctttggcacgtcgttttcaacaagtgcgcttaagtgagccttcaagagatgacactttgacaattatgcgtggcttgaagtcgaaatatgaaaagttccatcatgtgactatttctgatgagagcttgaaggatgcagttgatttgtcaacgcgctatatttcggatcgctttttgccagataaggcgattgacttagtagatgaagctagtgccgcagttaagattcgtaataacattagcaatgatgctgagctagaaaaagttaatgagcaaattaagaaactgattacgcaaaagaatatggctgccgctagtcaaaactttgttaaagctgctcaattgcaggatgagcagaacaacttagaaatgcaacgtgaagcaatggtagagaagttagaagacaaagttagtgctaaagctgtggttgagccagaagatatcgctaaagtagtttccaactggactggcgtccctgttacccagatggaacgcaatgaatcacggcagctagctaacctggaaaagattttacaccaacgtgttattgggcaagataaggctgtttcagcagttgcccgtgctattcgtcgtagtagaagcgggattaaagatgaacgtcgtccgattggttccttcttgttcctaggtccaactggtgttggtaagacagaactagctaagtcagttgcagcagcaatgtttggctcggaagacaatttgattaggctagatatgtctgaatatatggaccaaattgcttcaagcaaattaattggctcggcaccaggctatgtcggttatgaagaaggcggtcaattatctgaaaaggttcgtcgtcatccgtactcggttattttgcttgacgaagtagaaaaagctcatccagatgtctttaacttgcttttgcaggttttagatgaaggatttttgactgactccaaaggtagaaaagtcgactttagaaatacaattataatcatgacttctaatttaggttctcgttcgctctttgataataaggcagtcggcttcaatgcagataatgcagatccagccaaggcgagatcagctaaagttgaacaagcaatcaaacaattcttccgcccagaatttttaaacagaatcgatgaaactattatcttcgatgaactagataagaagcagctgcgcaatattgtaactttgttaacgcacaagctggtagttcgtttgcaaaagaagggtatcgaattgaagctatcacgggcagcactggatcagattgcacaagatggttatgatccagaaaatggtgctcgaccattgagaagagcaattcaaaatgatattgaagacaagattgccgagatgctgattgtaggcgaagttaagtcaggcgacactttgaaaattggtagtcagcatggacatttaaaatttgaagtagttaatccgaaaaaagaaactgtaaaagtcaagtgatattggtgctataccttgacaaaatgctgaaaatatcatataatttttgctgatttaaaaagactgagattcaggattttgctgatctattgtccagcaaaatgataagggacaaaaacgacaattgttgtttttgtcttttttatgcctaaaattgcagttttttgaatttgtaacagaaatgtaatatttgctttcttagacagaaaggatgtttttccttgttaaatggacacgtagtgaactacggtaaacatcgaactagacgtagcttctcccgcattaaggaagtattgaagttacctaacttaactgatgttcaaaccgaatcatataagtggtttcttgataaaggcattaaagaagtctttgatgacattatgccgattagcgatttctcaggtaagctttcattagaatatgttggctataaattgcaaaagccaaagtatacagttgatgaagcccgtaaccatgatgcaacttatgctgcaccaatgcacgttaccttgaaattgactaaccaagaaactggtgaaattaagactcaagatgttttctttggtgatttgccattaatgaccgaatcaggttcatttattgttaacggtgctgaaagagttatcgtttcacaattggtaagatcacctggtgtatattacactggcgattatgacaagaatggtcgtcaaatctttggtactactgttattcctaaccgtggtgcttggcttgaatatgaaaccgacgcaaagaacgtttcatttgttcgtgtagaccgtactcgtaaattgcctcttactgtattgattagagcaatgggtattggctctgacagtgacattattgatatgtttggtcaaagtgatactttgcaattcactttggacaaggatgttcataagaacccagctgactcacgtgtagctgaagccttaaaggatatctatgaaagacttcgtccaggtgaaccaaagactactgattcttcacgttcacttttgtatgcccgtttctttgatccacgtcgttacgatttagcacctgtaggtcgttacaagatcaataagaagctttcacttaagaaccgtttatacggtcaaactttagctgaaactttagctgatccagatactggggaaattgttgctaagaagggtactgtagttacccacgaagtaatggataagttagctccataccttgatcgtgatgactttaagatggtaacttaccaaccttcaaaggaaggcgtattaccagatcctattacagttcaagaaattaaggtttactcaaaggtagaccctgaacgtgaagttaaattaatgtcaaatggtcatattgctgataacgttaagcatttgactccagctgatgttttagcttcaatcaattacttctttgcattgcaagatgaaattggtactactgatgatatcgaccacttgggtaaccgtcgtattcgtcgtgttggtgaacttcttcaaaaccaatttagaattggtttggcacgtatggaacgtgttgttcgtgaaagaatgtcaatccaagatccttcaacagttactccacaacaattgatcaacattcgcccaattgttgcaagtattaaggaattctttggttcatcacaactttcacagtttatggatcaacataacccattaggtgaattgactcataaacgtcgtatgtcagccttagggcctggtggtttgacccgtgaccgtgctggttatgaagttcgtgacgttcactatactcactatggtcgtttgtgtcctatcgaaactccagaaggtcctaacattggtttgatcaactcacttgcttcatatgcgattattaataagtatggttttatcgaaaccccataccgtcgtgtttcttggaaggaccacaaggttactgataagatcgactatttgactgctgacgaagaagataattacattatcgctggtgccaacactccattgaatgatgatggttcatttaaggagaagttgatcttggctcgtcaaaaggaagataacgtcgaagtttctccagataagattgactacatggacgttattcctaagcaagttgtttctgtcgcttcagcatgtattccattccttgaaaacgatgactctaaccgtgctttgatgggtgccaaccagcaacgtcaggctgcaccattaattaatccgcatggttcacttgttggtactggtatggaataccgtgctgcacacgattcaggtgctgctttaatcgctaaggctgctggtgtagttgaatacgttgatgctaatgaaatccgtattagacgtgaagatggtactttggacaaatacacacttgaaaagtaccgtcgttcaaataactctaagtcatacaaccaaactcctaatgttaaattaggtgatcaggttgacaagagtgatgtaattgctaacggtccaactatggatcatggcgaacttgctttaggtcaaaacccattgattgccttcatgacttggaacatgtacaactatgaagatgccatcatgctttctgaacgattagttaaggatgatgtttatacttcaatcagtattgaagattatgaatcagaagctcgtgacactaagttaggtccagaagaaattactagagaacttcctaatattggtgaggatgctttgaaggatcttgatgctgatggtatcgttcgtgttggtgcagaagtccacgatggcgacattttggtaggtaaggtaactcctaagggtgtaactgaattatctgctgaagaaagattacttcacgctattttcggtgaaaaagctcgtgaagttcgtgatacttcacttcgtgtaccacacggtggtggcggtattgttcaagacgttaaggtttatactcgtgaagccggcgatgaactttcaccaggtgttaacacaatggttcgtgtttacatcgctcaaaagagaaagattcaagttggggacaagatgtctggtcgtcacggtaacaagggtactgttgctgcagttgttccagaagaagacatgccatacttaccagatggtactccagtagatatttgtttaaacccaatgggtgttccatcacgtatgaacatcggacagcttcttgaattgcacttaggtgcagctgctcgtcaattgggcattcacgttgcaacaccagtatttgatggtgctgacgaaaatgacgtttgggacacagttcgtcaagcaggtgttgataaagatggtaagaccgttgtttatgatggtcgtaccggtgaaccattccacaaccgtgtatctgtaggtgttatgcactacttgaagttgacccacatggttgacgacaagatccacgcacgttcaattgggccttactcattggttactcaacaaccacttggtggtaaagcacaatttggtggtcagcgttttggtgaaatggaagtttgggcccttgaagcttatggtgctgcttacacattgcaagagattttgacttacaagtcagatgacgttgttggtcgtgtaaaggcatatgaagctattgttaagggtgaaaagattcctaagccaggtgttccagaatcattccgtgttcttgttaaggaacttcaatcattaggtttggatatccgtgttcttgatatgaaccataatgaaattgaacttcgtgatatggatgaagactcaagtgaacacttgaacatcgatactttgtcacggatggcagaagagcaagaaaagaagaagttagccgaagaaactggaaaatcagaagataaagacagtaaagaaaatgcagataagccggtagctcctgcagatgagtctgacgataaagtttctaaatagtaggaggttaaacttttgatcgacgtaaataagtttgaaagtatgcaaattggtcttgcatcacctaacaagatcagaagctggtcatatggtgaagttaaaaagccagagaccatcaactaccgtactttaaagcctgaaaaagatggcttatttgatgagagaatttttggaccaacaaaagattggtcatgtgcttgtggtaagtacaagggcgttagataccgtggtatcgtttgtgaccgttgtggtgttgaagttacttcttcaaaggtaagaagagaacgtatgggtcatattgaattggctgcacctgtaactcacatttggtactttaagggtatcccatcaagaatgggattagttttggacatttctccaagattacttgaagaagttatttactttgctgcatacattgtaattgatccaggtgatactgaccttgaacctaagcaattattaactgaagctgaataccgtgaacaaaaagctaagtacggtaaccgttttgaagctaagatgggtgctgaagctgttcgcgatttgcttaagaaagttgaccttgataaagaagttaaggatttgaagaaagaacttcaaactgccactggtcaaaaacgtacgcgtgcaattagacggttagatatcttggatgccttcaagaattcaggtaacaagcctgaatggatggtaatggatgccgttccagtaattccaccagatcttcgtccaatggttcaacttgaaggtggccgttttgcaacttcagatttgaacgatttgtacagacgtgtaatcaaccgtaacaaccgtttgaagagattgcttgatttgaacgcacctaatattattgttcaaaacgaaaagcgtatgcttcaagaagctgttgatgctttaattgataacggtcgtcgtggtcgtccagttgttggaccaggtaaccgtccattgaagtcactttcacatatgcttaagggtaagcaaggacgtttccgtcaaaacttgcttggtaagcgtgttgactactctggtcgttcagttatcgatgtttcaccaaaattgaaattctatcaatgtggtgtgccacgtccaatggctttggaattgttcaagccatttgtaatgcatgaattagttaaacgtggaattgcatcaaacatcaagaatgctaagcgtaagattgaccgtgaagatgacgatatctgggatgtacttgaagatgtgattaaggaacgtccagttcttttaaaccgtgcacctactcttcaccgtttgagtattcaagcctttgagccaatcttggtaccaggtaagtcaattagacttcacccattagcttgtgaagcctacaatgccgacttcgatggtgaccagatggctattcacgtaccactttctgatgaagctgttgctgaatcaagattgttaatgttggctgctcaccacattttggctcctaaggatggtaagccaattgttactccatcacaggatatcgttttgggtaactactggttaactcaggccgaacgcggtcgtgaaggtgaaggtatgatcttcagctcaccagcagaagctgctgtagcttacgaaaatggcgatattcactaccataccattattggtatgtctgcagatgctatgcctaaaaagccatggcctaagggacatgaacacggcatctttattaccacttatggtaagattgtcttcaatcaattgttcccagatgattacttctatatcaatgaaccaactgaagagaacttgaacaatccgttggatgctaagtacttcttaggtgaaggcgaagagattgataagaagatcgatgaagtaggcgatgatttaatcgctagtccatttaagggaagcttcttgtcagattctattgctactatttacaagtattacaaggttcaaagaacttcagaatacttggatgatttgaagaagttaggctacattagctcaactacttcaggtattactattggtatgactgacgttccagaaatccaagataaggatgaaaaggtagccaaggcacgtaaacaagttgatgttgtttctaagcaatttagacgtggtttgattactgaacaagaacgtcacgaccgagtaattagtatttggaatgcatgtaaggacaagatccaaaacgaaattgcacaaattcacgcacctcgtaatccaatttcaatcatggcagactcaggtgcccgtggtaacatttctaactttactcagttagccggtatgcgtggtttgatggccactcctaacggtggtttgttcgaaattcctgttacttcaaactttaaggaaggtttgtcagtattggaattgttcatgtctactcacggtgctcgtaagggtatgactgatactgcattgaagactgctcagtcaggttacttgactcgtcgtttggttgatgttgctcaggacgttattattcgtgatgacgattgtggtactgatcgtggtattacagttagtgccatcatggaaggtgacgaaatgatcgaaccattatttgaccgtttggttggtcgtttcactgctgagactgttaaagatcctgaaactggcgaaactattgtcggcagagatgtcatgatggatgaaaacatggcacacaagatttgtgatgcaggtgtaactcacgttaagattcgttcaattcttacctgtgatactcctcacggcgtatgtcgcaagtgttacggtatgaaccttgctactggtgaagaagttgaagttggtgaagcagttggtactgttgctgctcaatcaattggtgaaccaggtactcagcttactttgagaactttccacaacggtggtgttgccggtgctgaagatatcactcaaggtttgcctcgtgtgcaagaattgtttgaagcacgtaaccctaagggtcgtgcaaccatttctgaagttgatggtgtaattgattcaattcaagaaaacccagcagaacatactcgtgaaattactgttaagggtaagattgatactagaagctacagtgttccttatacagcttcagttgctgttagcgaaggtgactacgttcatcgtggtgacaagttaactcttggttctgttgatcctaaggaattgattcaagttactgatacattaactactgaaaagtacatcttagctgaagttcaaaaggcttatagaatgcagggtgtagacattgccgacaagcacgttgaagtgttaactcgtcaaatgctgcaaaaggttcgtgtccttgatccaggtgaaactgacatcttgccaggtgaagttatggatattggtcaatttagagaccgcaacaaggaagttattatttctggtggtattccagcaactgctcaaagcgttatcttgggtattactaaggctgctttggaaactaacagtttcttgtcagctgcttcattccaggaaaccacacgtgttcttactgatgcatctattagaggtaagaatgatccacttcttggacttaaggaaaacgttattattggtaaaattattccagctggtactggtatgcctgtataccgcagcatggaacctgaagctgacgttaagaagccagattcagtatactcaattgctgatattgaaaagcaaatgaaagaaaaggataaagctaagcaagactaagctttattgaaaataaataagcatttccaatcttttaagagcgggaatgcttatttttttgtctaaaaaattaattgggttagtactaatcctaggaaaatatatggaataaatggatagcgatggttaataggagttttttcaataagaaaaattgcaattaccaagattgaagcaaatagaaaaactaaattggcaaatgatggggtgaagtagcaagcgataattaagtaaattaataaatcgcctagccccatttttctttgcattatgctatagctaaaaattcctagcaataatgtaaaagagatccagtcgattaatgtaaaagctgcaaattggttgaataaaatcgcaacgctaatggctggaattagtaggagaagatcaaattcttgcttttgataatcagagattgcaacgactaaaagcgaaaaaagcaaaatagcggtaataatgtcctgtgtcttactaaaatcgagtaaacaaaaggcaaagccgccaattaattcaaataaaaataattcaactggaatttgttgataacaataacgacattttccttgaagaaaaagataagataataatggaatttcatccaaaattgataattcaaggtgacagttgttgcactgagaacgtgagtaaataaaatttttatcattccagtgctcgtaaactactgctgcgtgagaagccaagcaacttccaattataaagttagtaaaaataaataagtatttcaaaaaaacacctccactatttattacgcaaaaatagccgatttttctttttttattttgaaaaagtttgctttctgcttaaaaccgagtacaatagtctttgtatgttttgaacagtctattcgtgagtaaaaaagaaactcccggatgtgtgaacaaaatagtattttaggaggaaaaattaatgccaaccattaatcaattggtaagaaaaggccgtcattcaaaggtcactaagtcaaagtcacctgctttgaattacagctacaacagtatgaagaaggaatcagtattcaacccagctccacaaatgcgtggtgttgcaactcgtgttggtactatgactccaaagaagcctaactcagctttacgtaagtacgctcgtgttcgtctttcaaacttgatcgaagttactgcttacattccaggtgaaggccacaacttgcaagaacactcagttgtattaatccgtggtggtcgtgtaaaggaccttcctggtgtacgttatcacatcgttcgtggtgcccttgatactgctggtgttgatggcagaaagcaaagccgttctaagtacggtactaagaaagattaaaggaggagttaaataatgcctagaaaaggtcacgtaactaagagagacgttttagcagatccagtttacaactcaaagcttgttactaagttgatcaaccacttaatggtcgatggtaagagagctaaggcatcttcaatcctttacgatgctttcaacattgttcaagacaagactggtaaggaaccacttgatgtatttgaagaagctatgaacaacgttatgccagttttggaagttagagctcgtcgtatcggtggttcaaactaccaaatcccagttgaagtacgtcctgaaagaagaactactttaggtttaagatggcttgtttcatacgctcgtttacgtaacgaacacactatggatgaacgtttagctaacgaaattatcgatgcttcaaacaacactggttcagcagttaagaagcgtgaagatgttcaccgtatggctgaagctaaccgtgcatttgcacactaccgcttctaatttgttcgttttaatttaaggagagaataatttatggctaacaagcgtgaatttccattagcaaagacacgtaacatcggtattatggcccacatcgatgcgggtaagactactactactgaacgtatcctttactacactggtaagatccacaaaattggtgaaactcacgaaggtgattcacaaatggactggatggatgaagaaaaggaacgtggtatcaccattacttctgcagctactactgcacaatggaaagaccacagaattaacatcatcgacaccccaggacacgttgacttcactatcgaagtagaacgttcacttcgtgttcttgatggtgccgtaactgttcttgatgcccaagctggtgttgaaccacaaactgaaaacgtatggcgtcaagctgaaacttacggtgttcctcgtattgttttcgttaacaagatggataagatcggtgctgacttcgataagtcagttaagtcattgcacgaacgtttaaacgctaatgcccatgctgttcaaatgccaattggttcagctgacacttttgaaggtgttatcgacttaatcaacatggttgccgacatctacgacgaagataagcttggttctaagtgggatactgttccagttcctgacgaatacaaggaagaagctgaagcacgtcgtaacgacttaattgaagccgtagccgatgttgatgacggcatcatggaaaaattccttggcggtgaagaaatttctaacgatgaattaaaggcagctatccgtaaagctactttggacttgaagttcttcccagtttacgctggctcagccttcaagaacaagggtgttcaaatgatgcttgacggtgttattgactacttgccatcaccacttgacgttaagccttacgttgctcacaatcctaagactggtgatgaagttgaacttatggctgacgataagaagccatttgcagctcttgcatttaagattgctactgacccattcgtaggtcgtttgactttcatccgtgtttacaccggttctcttgaatcaggttcatacgtattgaacgcttcaaagaattcacgtgaacgtgtaggtcgtttgcttcaaatgcacgctaactcacgtactgaaattccagaagtattctcaggtgacatcgctggtgctatcggtttgaagaacaccactactggtgactcattaactgacccagatcacccacttattttggaaagcttgaaagttccagatccagttatccaagtatcagttgaacctaagtcaaaggctgaccgtgataagatggacgttgctttgcaaaagcttactgaagaagacccaactttccgtgctgaaactaacccagaaactggtcaaaccttgatttcaggtatgggtgaacttcaccttgacatcatggttgaacgtatgagacgtgaatttaacgttgatgctaagattggtgaaccacaagttgcttaccgtgaaaccttcaccaaggaagctaaggcacaaggtaagtttgttcgtcaatcaggtggtaaaggtcaatacggtgacgtttggattgactttactcctaacgaagaaggtaagggttacgaattcgaagatgccatcgttggtggtgttgttcctcgtgaattcattccttcagttgaccaaggtttacaagaagctatgaagaatggtgttcttgcaggttacccattgatcgacgttaaggctaagctttacgatggtagttatcacgaagtcgactcatcagaagctgccttcaaggttgctgcttcacttgctttgaagaatgctgcttcaaaggctggcgcagttatcttggaaccaattatgaaggttcaagtaactactccagaagaatacttaggtgatgttatgggttcaatcactgctcgtcgtggtaccatggaaggtatggaagacagagccggtgctaagatcatcaactcatttgttccactttcagaaatgtttggttacgcaactactttgcgttcatcaactcagggtcgtggtacatttactatggtatttgatcactactcaccaacacctaaatcaattcaagctgacatcattaagaagcgcggcggagatgctgaatagcttccgttaagaactgattaatgcagttagcttaattgaaaacaatttcatataaaaaagagttatcatttttattcaatgtcattaagttaagacattgacaattaatattagacttttaaagcactgatttaacatttaattggttaaattggtgcttttttcgtacaacaaataaggcatagcacagattctgcttttttaagctacgcgatataaataatatacagctgatttgggcttaatatttctcttgtccttgcggcctggtctaattggaatggtataatagctgatctgaataaggatccgttcaaaatcttgcgttaaagaagaagccaaatacatgctctgaataatcaagcatgattgcttgaaattgatggcatattgatacttgcaatgcttttgcggaatataggcctgtgcatcaatttgactgattgcattaaacataatcatatgggcataaatttccatttcaataaatttatcttgtttggaatggaactgtacactgcctaaagaatacttcaatttcttgaaggaggtctcaataccccaacgcagatgataaagctctttaattctttttagcggataattttttcgatcaagattggttagcacaacttcccattcttctttgcctgatttggcatcattaattctaaatttgcaggctcgaaattttattgtgcataactcgccaaaatcccagcttagatcctgggtatttttagagcgatacttaatatattggcgataatgatgctggacatggtgaatattctcactggctttatgcgtgatgtagtaatagttagaagtagttaccaggcaggaaatctcacgatcacattcttgatcaggcaatgtcgttatttctttaactccgccttgtccagccttagttcgtattatgtaatgacagttaggcaggcgattgcagttttcaatcatattgaaactagtgtagccacgatccattgttacaatatatggaccacaattcaaagctttaagcatttgaacagccgctttgcgttcatccatttctgatttaggctgaaaaatacaatcctggtaggtattattcaatagatcatataaggcattaacgtgaatttgacaatagggtttctttttatgagaagaagcttgtacaatgttattcgatttcggattccagatttgattaaagtcagagccatcaatggcaaacaaacggtagtgatgatcaaaaagttgaatattaaatagattttgattaaaaacagtcagaatatgtttaaaacaagcaggagaaagctggcttttgcgttgaacataggcagaagtactaactactttatcgttctttttagttgcatcttcgccaaaagctctaaagagttcactgtttaaattctgaccttgcatgttaattgtagttttaaggactgtcgctgcatctaaagtgcgtttcctggtaaaagcatgaggattattaataaaatcgtgaatatgatccccagtattattgataatttgatcaagacgttctagaatattcttatgaagggctttcataattaacaccatctttctggcaataattttgaaggtttaaaatatataatatataagataggcgaaaaggctggtcttttcgcctttattttatacaaaaaaagagatcgaatccaaatgattcgatctctaaaaaagcacccttaattgtcaatgtcttaacttaatgacattgcatttttattttgataactctttttttgtaaataaatttaagaaaaaagtcgtaaacccttgatatttaaggagggacaaagtacaatagtttttgtgcttatgggacagtgtgcccttaagtgtgaaaatcgttgtaaagcgttgacgcaaaaggttgcggcacgccaggctgcattgccacagtggcgtgcggggaatttttgccgagcgagtcatcttttaaagaagacgttaaggaggtaatttaatggcaagtcaaacaattcgtattagacttaagtcttacgaacatggtattctcgatgaatcagctgctaagatcgtagctactgcaaagagaactggtgctgaaatttcaggtccagttcctcttccaacagaaagaactttattcacagttcttcgttcaccacacaagaacaaggactcacgtgaacaattcgaaatgcgcactcacaagcgtttaatcgatattttgaatccaacaccaaagactgttgattcattaatgaagcttgatcttccaagcggtgtagacatcgaaattaaactgtaatttaaatagaaagaggtgtaaacatgaccaaaggaatcttaggaagaaaagttggtatgactcaaatctttactaaagatggtgtccttgttcctgtaactgttgttgaagcaactcctaacgttgttatgcaagttaagactgttgaatcagacggttacgaagcagttcaattaggttaccaagacaagcgtgaagttttgagcaacaaaccagaaaaaggtcatgctgataaagcaaagacttcgcctaagcgcttcattcgggaaatccgcggtgttgagcttaaggactatgaagttggctcagaagttactgtggatacatttaaggaaggtgacgttgtaaacgttactggtacttcaagaggtcatggataccaaggtaacatcaagcgttggggccaatcaagaggaccagaaactcacggttcaagataccacagaattcctggttcaatgggttccatcattaaccgtgtaccaaagggcaagcgcttgccaggtcacatgggtgtgaagaaagttaccattgaaaacttagtaattgaaaaagttgttgcagacaagaacgtattgatgattaagggtaacgtcccaggtgctaagaactcattaatcgttgttaagactgcttctaaagctgtaaaggctgataaataggaaggaggactagaatggctaatttaaaagttatggatcaaaacggtaaagactctggtgaagttactttaaacgataaggtttttggtattgaaccaaatgaaagtgtcgtttttgaagcaattattagacaaagagccggcaagcgtcaaggtacctcaaaggttaagaatagatctgctgttcgcggcggtggtaagaagccttggagacaaaagggtactggtcgtgctcgtcaaggttctatcagagctccacaatggcgcggtggtggtacagtctttggcccaactccacgttcatacgcatacactatgccaagaaagcaacgtcgtttggctattaagtcagttctttcccaaaagttgattgacaatgatttaattgttttagataagttgactatgtcagctcctaagactaaggaattagtatcaatgttaaacggcttaaatgctgacggtaaagttttaattgtttcagatgataacaatgtacaactttccgcaagaaacttgactaaggttaaggttgttccagttaatggcttaaacgttgaagatgctgttaactatggcaagttgatcttagatcaagatgctgttaagaagatcgaggaggttttggcttaatggacgcacgcgatatcattttaagacctgtcattactgaaaagtccacgaacttaatggatgataagaagtacacattcgacgtgcttttaactgcaaccaagacacaagttcgcaatgctgttgaagaaatcttcgatgttaaagttaagaacgtaaacattatgaacgttcgcggcaaggacaagcgagtaggtcgttacactggtaagaccgctcgtcgtagaaaggctatcgttactttaactaacgattcaaacgacatcaagattttccaagacgataacacagaagacaacaagtaataggaggtcagtcaattggctattaagatttacaagccaaccacgaatggtcgtcgtcatatgacttcttccgactttgctgagatcactaagacaaagcctgaaaagactttacttgaatctcaatcacatactgcaggtcgtaactcatatggtcatatcactgtaagacaccgtggtggtggtcacaaacaaaaataccgtatcatcgactttaagcgtaacaaggacaacgcaaaggcagttgtaaaggctatcgaatacgatccaaacagaactgctaacattgctttgcttcactacactgatggtatcaaagcttacatcttagctcctaagggcttaaaagttggcgatgtagttgaatcaggtgattcagttgacattaagccaggtaacgctttggaattaaagaatatcccaactggtacttcaattcacaatatcgaattaatgccaggcaagggtggccaactcgtaagaagtgctggtgcttcagctcaagttttaggtgctgatggtgattacactttagtaagattacaaagtggtgaagttcgtaagattttgtcatcatgccgtgcaactatcggtactgttggtaatgaacaacactcattgattcaattaggtaaagctggtcgtaagcgttggttaggcaagcgtccacaatcacgtggttctgtaatgaaccctaacgatcacccacatggtggtggtgaaggtaaggctccagttggtcgtcctcaacctatgactccatggggtaagaaggcacgtggtattaagactagagataccaagaaggccagcgagaagttaatcattcgtcaccgtaaaggtagcaagtagtagaaggagggttaattaatgagccgtagtattaaaaaaggtccttttgctgatgcatcattgttaaagaaggttgatgcacaagcagatgcagataagaagcaagttattaagacttggtcacgtcgttcaactattttcccttcctttgtaggtttgactatagctgtttacgatggtagaaagcatgtcccagtatatgtaactgaagacatggttggtcataagttaggtgaatttgttccaacaagaactttccacggacacaaatccactgatgataaagccacaacacaagcttagaggaaggagaaacatctaaatggcagaacaaattagttcagctaaggctgaagcaagaactgttcgcatcgctccaagaaaagctcgtttagtcgttgacttaattcgtggcaagagcgttgctgaagcattagcaatcttggaatttacgcctagagctgcttccccaatcgttgaaaaagttttacgttcagctattgctaacgcagaacataactacgatcttgaaagtgcaaacctttacgtatcagaagcttatgtaaatgaaggtgcaactttgaagagattccgcccacgtgctaagggtatggcttctccaattaacaagagaaccagtcacgtagttgtagtagtttcagaaaagaacgattaagggaggtatattaatgggtcaaaagattaacccaaacggttttcgtctcggtgttatccgtgattgggaatcaaaatggtatgctgacaagggatacaaagaaactttaaatgaagaccttcaaatcagaaaatttatttcagaaaagttgaaggatgcctcagtatctactgttgaaattgaacgtgcagctaacagaatcaacatttcaattcatactgctaagccaggtatggtaattggtaaaggtggttctgaagttgaagctttgagaaaacaattaaatgctttaactggtaagcaagttcacattaatattgttgaaattaagaaaccagatcttgatgctaagttagtagcagatagtattgctcgtcaacttgaagctcgtattgctttcagacgtgctatgcgtcaagctactcaaagagctatgcgtgctggtgccaagggtattaaggttcaaacttcaggtcgtttgaacggtgccgatatggcaagaagagaatggcacacagaaggtcgtgttccattacaaactttgagagctgatattgattacgcttgggtaaatgccttcactacttatggtgaaattggtgttcaagtttggatcaaccgtggcgaaatcttacctactcgtaagaataagccagcttcaaagccagcgaagggaggaaatagataatgcctttagtaccaaagcgagtaaaacaccgtcgtgaattccgtggtaagatgcgtggtgctgctaagggtggtaaatatattgcctttggtgaatatggtcttgaagccctcgaatcacattggattactaaccgtcaaatcgaagcagctcgtgttgctatgactcgttacatgaaacgtggcggtaaggtttggatcagaattttccctcaaaagtcatacactgctaaaggtgttggtgtacgtatgggttcaggtaaaggtgcaccagcaggttgggtagctgtagttaagagagaaaagattatgttcgaaattggtggtgttgatgaagcaactgctcgtgaagctttacgtcttgcttcaactaagttaccaattaagactaagtttgtaactagaagttcggaagtaggtggcgaatctaatgaaggctaaagatatcagagcattaaccactgatgaaatgttagaaaaagaaaagcaatacaaagaagaactcttcaatttgcgtttccaacaagcaacgggtcaattagaaaataccgctcgcttgagcaaagtccgcaagaatatcgccagaatcaagactattctgagcgaaaaagcgttagaaaacaattaatggaagggagctattaacttgagcgaaacaaacgaaagaaatcgtcgtcacgtataccaaggtcgtgtagtttctgataagatggacaagactatcgttgtagttgttgacacttacaagaaccaccctgtttacaacaagcgtattagatattcaaagaagtactacgcacaagacgaaaataacgaagctaaagttggcgatactgtacgtatcatggaaacccgtccattatctcgtaagaagcgcttccgtttagtaaagattgttaagaaatctgtttaatttgcggatttagtgaggggaggattacacagtgattcaaaacgaatcccgtttaaaggttgctgataactctggtgccagagaacttttagttattagagtcttaggtggttcaaagcgtaagaccggtaacattggtgacatcgtagtatgtactgttagacaagcaacaccaggtggcgttgtcaaaaaaggcgacgttgtaaaagctgttattgttagaactaaatcaggtgcacgtcgtgaagatggttcatacatcaagttcgacgaaaatgctggcgtaattatcaacgcagacaagagcccacgtggtactcgtatctttgggccagttgcacgtgagttacgtgagaacgactttatgaagatcgtctctcttgctcctgaagtcttataattgatagtgaggtgcactgatgttcgttaaaactggtgacaaagtaaaagttattgccggaaaagataaaggtaaagaaggtactgttctttctgttaacgttaagaaaaaccgtgtagtggttaagggcgttaacaagattaagaagcatcaaaagccttcacaaagcaatgctaatggtggtgtagttgaatcagaaggttcaattcacgcatcaaacgttaaagtaattagtagtaaaaaagaagataagtagaagggaggacacacatggcaagttatttagctaaggaatacaacgaaaaggtagctcctgcattagaagaaaagtttaactacaagtcatctatgcaagtacctaagatcgacaagattgttttaaacatgggtgttggtgatgcagtttctaacgccaagaacttagatgaagcagttgaagaattaactttgatctcaggtcaaaagccattaatcactaaggccaagaaatcaatcgctaacttccgtttacgtgaaggtatgtctatcggtgctaaggtaactcttagaggcgacagaatgtacgatttcttgtacaagttaatcaatgtttctcttccacgtgttcgtgacttccgtggtgtatcaactcgttcatttgatggtcgtggtaactacactttaggtattaaagaacaattgattttcccagaaatcgattttgataaggtaaaccgcactagaggtttagatatcgttatcgtaactactgccaacactgatgaagaagctcgtgaacttttgactcaatttggtatgccgtttgcaagatagtggaggacattaatggctaaaacatcacaaaaaattagaaatcgtcgtcctgctaagttctcttcacgcgaatatacacgttgcgagagatgtggtcgtccacactccgtataccgtaaattcgggttatgccgtatttgcttaaaggaattagcacacaagggtcaaatccctggtcttaaaaaggctagttggtagtatacggttaggaggatagcttaaatggtcatgacagatccaatcgcagattacttgactagaatcagaaatgccaacatggcaaaacacgattcagttgaaattcctgcatcaaacattaaaaagtctatttcagaaattttgaaacgtgaaggcttcatccgtgattacgaagttgcagatgataacaagcaaggcgttatcaaggtattcttgaaatatggtccaaatggagaacgtgttatctcaggtttgaagcgtatttctaagccaggtcttagaaactacgttggcgctgaagacttacctaaagttcttaatggcttaggcattgccatcgtttctacttctgctggtgttattaccgacaaggaagcaagacaaaagaacgttggcggcgaagtaattgcctacatttggtaatactgacagaaaggagaacaatcaatgagccgaatcggtttaaagactattgaagtccctgacagtgtcactgttaccaaggaaggcgacaatattactgttaagggcccaaagggtgaattaactagatacttcgatccaaagattaagtttgaacaaaaagatggtgaaattaacttttcacgttcaagcgaaagcgacaaagcacttcacggtactgaaagagctaacttagcttcaatgatcgaaggtgtagttgacggttataagaagactttgaagttaatcggtgttggttaccgtgcacaagcacaaggcaacaagattactttaaatgttggttattcacacccagttgtattgactgcaccagaaggtgtttctgtaaaggcaacttcagcaactgatgtagaagttgaaggtgtttcaaagcaagatgttggtcaatttgcagctgaaatccgtgccgtacgtccaccagaaccttataagggtaaaggtattcgttatgttgatgaatacgtacgtcgcaaggaaggtaagactggtaagtaataagtagttatttttgaggtgaaattgtgatttctaaaccagataaaaacaagttacgcttaaagcgtcatagacgtattcgtggaaaaatttctggtactgctgagcgcccacgcttaagcatttttcgttcaaataaaaacatctacgctcaattaattgatgacgtagcgggtgttacgcttgcaagcgcctcaactttggatgaaaatgtatcagatgcaactaaagtagaacaagctgctgctgtaggtaaggcaattgctgaagctgcaaaggcaaaaaacatttctactgttgtattcgacagaagtggttacttataccacggccgtgttcaagcattagctgatgctgctcgtgaaaacggattagatttctaggaaaggagaattaacacatggcaaaccgcaatgattctcgtaacaatcgcagaaacaaagacgatatcgaagatcaattagtcgctgtcaaccgtattactaaggttgttaaaggtggccgtcgcatgagatttgctgctcttgttgttgttggcgacaagaaaggccgtgtaggttttggtactggtaaagctcaagaagtcccagaagcaatccgtaaggctgtagaagacggtaagaagaaaatgatcaatgtacctaaagttggtactactattcctcatgaagttattggtcactacggttcaggtaacattttattgaaacctgctgaagctggttctggtgttgctgctggtggtgccgtacgtatcgttatggatatggctggtatctcagacgtaacttcaaagtcacttggttcaaacactccaattaacgttgttcgtgcaactatcgatggtttgaagaagcttagaactagtgaagaagttgcaaaacttcgtcaacctgaaagagcttaagattagggagatcatagatgactgatttaaagattactttaattagaagtgttgctcaccgtctacctcaacaaagaaagatcgttaaagctcttggtttaggtagagtggatagtactgttgttcttccagacaacgctgctactcgtggtgcattattaaagattgctcacttaatctctgttgaagagattaacaaatagaatatcaaggaggtgccaaattaatgaagcttcatgaattacattctgctgaaggctcacgtcgcaatagaaaacgtgttggtcgtggtacttcaagtggttacggtaaaacttcaggccgtggtcaaaagggtcaattagctcgtcaaggcggtcatactcgtttaggttttgaaggtggtcaaatgccattattcagaactatgcctaagcgtggttttaagaacattaaccgcaaggaatatgcaattgtaaacttagatgatttaaacaagttagaagacggcagtgaagtaactgtagaatcacttaaagataatggcttagtaaagaaagaattgtcaggtgttaagttacttggcaagggcgaattaaaagttaagttaactgtaaaggttaataaagtttccgcatctgctaagcaagcagttgaagccgctggcggaactgttgaggtgatctaatgttttcgaccttgaagaacgccttcaaagataaagaaattagaaataagctctatttcacgctctttattcttttgctgtatcggatcggtgcaaacattaccgttcccggtgttaatgcgaaggcgatcacgcaggttgcgcaaactggtttagttccaatgctggatactgtatctggtggtggactagataactattcaatattttctttgggtgtttctccttatattacggctcagattgttatccagctgctacagatggatattgttcctacgttagtagaatggggaaaacaaggtgaagtaggtcgacgtaaaacaaatcaagtaactagatatttagcattagttgttgcttttatccagagtattggtattacgttaggctttaacgctttaactcaaatgggtttggtaaagaatcaaacaccacagacttatatagaaattgctattattatgactgctggaactatgttattaacatggttgggtgatgaaatcactgataagggtctaggtaatggtatctcagtaattatttttgctggtattattgcaagactaccaagtggtctatggcaaatttataaggaagaaattattaataatagtgctagtgatcgttggcaaggcattttgttcttcatcgcggttatagttgcaatccttatcgtaactcaatttgttacatgggttgaacaagctgatcgtcgtattccaattcaatatacgagaagagcgacgatgagtggttctgaaagttttctaccattaaaggttaatgtatctggagttattccggttatttttgccagttcatttattgttacaccggcaacgattttaatggcctttcaaagaacccagggcgatcaacaatggtttaaagtaatgaaccaaatctttagcttacaaactactcctggggtaattatctacactcttttaattatcttatttacattcttctacgctttcgtacaggtcaaccctgagaagctagcagaaaacttacaaaagcagggtgcttatattcctagtgtatggccaggaaaagatactcaggattatatttcaaagatgttgatgaaattatcaacagtaggttcattattcttgggcttagttgctttactgcctcaattggctactaacttttggaatctcccaagttccattggtttaggaggaacaagtcttttaattgtgattggggttgttctcgagttatctcgtcaaattaacggcttgttaatgaagagagaatatgttggattcatcagataggaacggataaatgattaacttaattcttttagggttaccaggtgctggtaaaggtacagcatcagagcgaatcgttgataaatatcacttaactcatatttcaactggggatatgtttagggaagcaatggctaacaagacgaaggttggtcttgaagctaagagttatatcgataagggtaatctagtacccgatgaagttactgcaaagttggttgaggaacgtttaagtcaacctgatattaaagaaggttttatcttagatggttttccaagaaccactgtacaagcagaacttttagatggtattacaaaacgtttggagaaacctttaacaaatgtcattgcgcttgaagttgacgaagacactttgattaagcgtttatcagcaagatacatgtgtaaaaattgtggagctacttacaacaagctttccaagcagccaaaagttgagggcacttgtgatcgctgtggtggccatgaattttatcaacgtgaagatgataaaccagaagttgttaagaatcgtcttgaagttaatgaaaagatgaatgcacctttgaaggacttttatcagaagaaaggcttgctcactgtaattaatggtgaacaaactccagaaaaagtctttgaagatattgatgcggtattgagtaataatcaatagaagaaaaatttgtataattttttatccgtgttataatttcaaagtatatgactgtttaattgcggaggaacaactttggcaaaagatgatgtcattgaagtagaaggtaaggtagttgataccttacctaatgctatgtttaaagttgaattggaaaatggagccacaattttagcacacgtttctggtaaaattaggatgcactacattcgtattttgccgggagaccgtgtgactgtggaattatctccatatgatttaactaaaggtagaattacgtatcggtttataaagtaatataacggagggaaacatgaaggttagaccatctgttaaaccaatgtgtgaacattgtaaagttatcaagagacatggccgtgtgatggtaatttgctcagcaaatccaaagcacaagcaacgtcaaggttagaaatagagggggtgtagtttatggctcgtattgctggtgttgacttaccaagagataaaagaatcgttatcgctttaacttacatttacggtatcggtgaagcaactgccaagaaaatttgtgctgatgctggagtatctgaagatattcgttcaaaggatttaactccagaagatcaagaaaagcttcgtgctgaagttgacaagtaccgtgttgaaggtgacttacgtcgtgaagtaagcatgaacattaagcgtttagttgatattggttcttaccgtggtattcgtcaccgccgtggacttccagttcgtggccaaaataccaagaacaatgctcgtactcgtaagggtactaagagaaatcgttaattttatttataaggaggtttattgatgcctgcaaagaaaacagcacgtaagcgtcgtgtgaagaagcatgttgaaagcggtgtagcacacattcactcaacgtttaataatactttagtcatgattactgacgttcaaggtaatgcagttgcttggtcttcagctggtgcattgggctttaagggtagtcgtaagtctactccatttgcagctcaaatggcagctgaagcagcagctaagagtgcaatggaccaaggcatgaaacatgtagaagtttcagttaaaggtcctggtgctggtcgtgaatctgctattagatcacttcaagcaactggtcttgaaattactgcaattcgtgacgttacgccagttcctcacaatggttccagaccaccaaaacgtcgtcgtgtttaattttgtccttgatataggacgtaacgttttgaaaggggcccagtaatgattgaatttgaaaaaccaaatattaccgttgttgaacaagaagattcttacggtaagtttgttgttgaaccacttgagcgaggctttggtactactttaggtaattctttaagaagagtattacttacttctattccaggtactggacttgtttatgtgcaaattgatggcgttttacacgagttctcaacagttcctggcgtcagagaagatgtaaccaagatcatcttgaacttgaagaaacttgaattaaagtctctttcagatgaacaaaaggttattgaattggacattgaaggtccagccacagtaactgctgatgatcttaaagttgatgcagacgttcaagtcttgaatccggatcaatatatttgtaccattgctgaaggtggacacttgcatatggaacttgccgtaaagaatggtagaggttatgttgctgcaagtgacaataagagtgatgacatgccaatcggagttatcccagttgactctttattctcaccaattaagaaggttaactaccaagttgaatcaactcgtgttggtaagagagatgactttgataagctcacttttgagatttggactgacggttcaatcaagcctaatgacgcccttagttttgctgctaaaattttagttgaacactttaaggtatttgaatcagcagatgcaaatgctaaattcagcgaagtaatggtggaaaaggaagacgataagaaggaaaagaagcttgagatgactatcgaagagcttgacctttctgttcgttcatataactgcctgaagcgtgctggcattaatactcttcaagagttaactgacaagacagaatcagatatgatgcgtgtacgtaacttaggacgtaaatcattggaagaagttaaaaataaattaaccgacttaggtctttcacttcgtcaagaagactaagcttaggtgaataaaggaggcaaatccatggcataccgtaaattaggtcgcgatagtgctcacagaaaagcaatgcttagagaaatgactactcaattaatcatgaacgaacgcattgttactactgaaactcgtgctaaagaagttcgtaagactgccgaaaagatgatcactttaggtaagcgcggcgatttagcagctagaagaaaggctgctgcatttgtacgtgacgaagttgcagatgttcacgaagaaaaagatgcagttgttgttaagtcagcattgcaaaagcttttcagtgatgtagcacctcgttacaaggaacgtaatggtggttacaccagaattttgaagttagccgttcctcgtaagggtgacgctgctccaatggttattcttgaattagtttaatttagagtaacacaacttaatacgtattaagaattatccatgaaagtgagaataagcgtaaagatgatggcgcaagcttagtctagcttagatgataaaaatcatccctcttcatgggtgattttttttgctctttttttctgttacaattgctaataagcgatttaagaaaggaagtggaaaaatgccagtagatagtgctgttgaatttaaggatgtctcatttacctatcccgatactaaaaaagcgattcttgatcagattagttttaaaataaaaagaggttcctggacatctttgataggtcacaacggtagcggtaagtccacaatttctaaattaattaatgggttacttttgcctgattctgctaataattctagaatcactgttttaggaatgacgttaaatcaaaagacagtctgggatgttagggaaaaagtcggtattgtatttcagaatccagataatcagtttgttggagctactgttggcgatgatgttgcttttgggcttgagaatagagctgttcctcgggagcaaatggtaaaaatagtcagaaaagttttagcagacgttggaatgctggattatatagatgcagagccagctaatctttctggtggacaaaagcaaagagtagcaattgcaggtattctcgccgtagaaccgaaaattattattttagatgaatcaacttcgatgcttgatcctaaggggagagagcaggtgctaaaaattattaagcatttaaagaaagagaagaatttgacagttatttcgattacacatgacattgatgaggctaatatggctgatgatgtgatcgtcttaaatgatggcaagattttagctcaaggaactccaacggaaatttttagtaaaactgaaatgttgcaagaaatagggctagacattccatttgtacaaaaattaataaataaattaaatgaagtgggaatttctgtacctaaaaatataaaaacgaaagatgagttgaaacaatatctatgtcaattaaatttgaaaaagtaaattatatctattctcccggaacttcaatggagaaaaaaggattagataatgtttcatttgaattaactgaaaatagttttgttgcattggtaggtcataccggtagtggtaagtcgactttgatgcagcattttaatgcattactgaagccgagttcaggaacaattgatattgctggttatcatattactgctcaaacaggaaataagaatttgaaaaagttacgcaagcgggttagtttggtttttcagtttcctgaagcacagctttttgaaaatactgtgcttgaagacattgaatttggtcctaaaaactttggagcaaccgatgatgaagctaaaagtaaagctttgaaatggttgaagcgagtaggattggataaatcgctagcaaataagtcgccatttgagttatctggaggacaaatgcggcgtgttgcaattgctggggtaatggctgatgaaccagaaattttatgcttagatgagccagcagcggggttagatcctaagtctcgtaaggaaatgatgaaattatttgttgattatcaaaaagcaggtcatactgtaatcttggttacgcataatatggatgatgtggccgaatatgcagatgatgttttagtgatggaacatggtaaattaattagacatgatgcgcctaaggcgatttttactaataaaaactggctagaaaagcactatttgagtgaaccaacggctagtctttttgcctcagatttgacgaactttaactttaaagataaaccgttaacactggatcagcttgttaatgaaattaagaaaaatttgcgagggtagtttatgagtaagataattgtaggacgttatattccgggagattctcttatttataaaatggatcctcggagtaaattattagttaccatattatttatattggctatctttttagctaataattcaataacttatgcgattgtgaccattttttgcttcttagctgtagttgctacaggattaaatgtaaaagtattttgggatggcgttaagcctttgattggtttaattttctttacgtcgcttttgcaattgttttttatgactggtggtcatatttattggcattggtggattttttcattatctagctacggtttgattaatgcaatctatatttttattcgttttacattaattattttaatttcaacagtaatgacagttactacaatgccacttgaaattgctgatgcgatggaatggctgcttaagccgcttaagttgtttaaagtgccggtggataaaattgcgttagtaatttcaattgcgcttcgttttgtaccgactttgtttgatgagacttttaaaattatgaatgcgcaaagatcacgtggagcggacttcaatgacggtggtttaattcaacgtgctaaggcaattacgcccattttggttccgttgtttattcagtctttagaaacggcaattgatttatctacagcaatggaatcacgtggttatcgtagtagtgaaggacgaactaaatatcgcgttttaagttggtcaaaatatgatttaattgcattattttattttgtactgttagtcggattactattaatttttaggacacattagaaatatgacaacaagatataaaatgacgatggcttatgatggtcatctttttcatggctttcaacttcaaccagaccagcgaactgttcaggggacaattgaagatgcgttgaagaaaatgactaaggggcagcgtgtgattgtgcaggggtcaggtagaactgatgccggtgtacatgcggttggacaggtaattcattttgattatcctggtaaaactattccagccaatcgaatgattttggcaatgaattctatgatgccaaccgatattatctttgatgattgccaaattgttgatgagaattttcatgcgcgttattcgattaaggggaaatggtatcgctatcgtgttagtttagatcattttgttaatccttttaagcgtttttatactggtcattttccgtatccattagatattgaaaaaatgcaggttgcagctcaggacttattgggtaagcacgattttaccagttttgcggccagcggtggtcaaattgaagataaagttcggaccatttattatgtaaacattactaaagacgaaaaagaaaatgaagtaatttttgattttattggttcaggctttttgtataatatggtgcggattatggtagcggcgctactggaaattggtaatgatcgtaggccaattcatgacttgcaacgagtaattgctgccaaggatcgtcaagaggtaagacaaactgctcatgcgagtggtttgtacctttatcatgttttttacgatgaaatcccacaaaaatatcgtttagaacagcatttataattgactttttatctaaaaggacgtactctagtatagtatgtttgtccacgataggccccggaaacttattgttttcaaactgcaaataaacggaggaatttaaattgcgtactacaccattagcaaaatctagtgaaatcgaacgtaagtggtacattattgatgcaactgacgtaactcttggtcgtctttctgcagctgttgccactattttgagaggtaagaacaagcctcaatacacacctaatgttgatactggtgataacgttatcgttatcaacgcatcaaagattagattgactggtaaaaaggcttcagacaagttctactaccaccactcatcatggcgtggcggcttgaaggccgtatcttacggtgaattgcttgctaataacccagttaagatggttgaaatctcagttaagggtatgcttccaaagaacactcttggtcaccatgaattcatgaagatgcatgtttatgctggcgaagaccacaagcacgaagcacaaaagcctgaaaagttagatattaacaaattaatctaggaggttatacaatgacacaacaagctgcatatacaggtactggtcgccgcaaggattcagttgcgcgtgttcgtttagtaccaggtaacggtaagatcactgttaacgataaagatgttgatcaatacattccattccctaacttggttaaggacttgaagcaaccattaacattaactgaaactgaaggtcaatacgacattcacgttaatgttaacggtggtggtttctcaggtcaagctggggctatccgtcttggtatcgctcgtgcacttcttgaagttgacccagacttccgtagtccacttaagaaggccggtttcttaacccgtgacccaagaatgaaggaaagaaagaagccaggtttgaagaaagcccgtaaagcttctcaattctcaaagcgttaatatttacgttcaaaaatgttgttatatcaacgttttggagacttcagttggtcacctatggtcacaatgctatagggattccaatagatttaaagcattcgcatcttgcgagtgctttttttctggcattaattccagatagtatttttcagtagttaagattgaatcgtgtcctaatcttctgctaacataagataaaggaatattattactgaataaaaaagaagcgtgggtatctcttaaaccatgaaatgtggttgaagggatgcctatttttttgagcaattcttttaacataccagactgtttaaagctgaaccagtcaaacaaatagccagaatctttttgagagatatccttcaatagatcgtaaatattcttaggaatagtcacactgcgtctagaatgtttagtttttaatttagtatcgtcagtagtagggctaattgatcgttttacttcaacgcaataatactgaccatcgtaatgcacatcctcaggcttaatacctaaaatttcaccacgtcttaaaccagtactaatctcaagtaataccattaagttaaattcattatctgtatgttcaagtaagtaatgttttaacttagttagatcagacattgatgaagctttattgcgtttaggtaattcttttccgtgtgctttaagtaaactagcaaaatcattgtaaatgtatcccttaacataagcatagcggagagcagttctaattttcttaagtaattcagttaccgttttcttagaatgtgttttgccatatttatctaagatactttgcatttgtacgtcatcaagcttaccaagtttagcggttggaaaaagattatcaattactttaccagctttaacataattatcaaaagttgcttttctaacgtcatgtacttttactgtttgaacgaataaataataaaagtccttgaataaagtgttttgctgggctattgcttgacctttagccttttgtagttcaagagtagtactccaaactttagcttctttttcagttttaaaactcttagttaagtaatcacgttttccgagactgtaaaatagtttgtgtaaggatgaatgattccttaaatttatttctttaaacattagaaaaaggagttcctttctcgtatgattggtttgaacaaaaaaacacatacagaaagaagaactccttcatgaatgattttaccaaagattttgctcaagctctattcaatccagacaaaataaatgatttattgcgcaaagagctacaacaggctgttaataacttgctagaagctgagttgactgcctttctaggctatgatccctatgccagaaatggctggaatactggcaattctagaaatggtgcttatttccgcaaggttgatacccagtttggaccaattgaagtgcaagtgcctcgagaccgcaacggtcagtttcatcagcacacgctgcctgactacaagcagcactctgatgttttggaaagcacgattatcaagctatactccaaaggcgtaactaccagagaaatcgctgacttgattgagaaaatgtatggcagtcattatagtccagctcaagtatcaaatatttccaagcagatgctccccaagattgaggcttatcacaagcgcaagctaagcgacaagtttttctgtgtctatttggatgcgacataccttcctttgcgccgagaaacgtttgagcgtgaagcagtatatattgccattggcattaaacctaatggacataaggaagtcattgactactgcattgctcctagtgagaacattgaagtttggacagagatgcttcaaaacatgaagtccagaggcttgaagcaagttgagctttttctttctgatggtgttgttggcatgaaaacagccttggccaggacttatcctaaagctcattttcaacgctgcctggttcatgtcatgcgcaatatctgcgctaaagtacgcgtcgacgatcgtgaaaagatcatgaacgaattcaagcagatacatcaacagacaagcaaaaaagaagctgcagctgtcttgcacaaattctatgccaaatggaataaagcttatagccatgtcatcaaaggtttgaaggaaattgagcccgatctgctagtcttctacaattatcccaaacaaatcagagcttcaatttattcaaccaatatgattgaatcctttaacaacgtcatcaagcgtaaagctaagcctaaggcagaatttccaactgaacagtcgcttgatgcatttattggcatccaggcaatgagctacaatgaccgttatttcaatcgaattcataaaggctttggtcaggttcaggacaccttagaatcctactttgattaaataaataattaaaaaatcaatttacgagaaagatctatttacacaaaagatttgacagtttccgttttccatgttgatagattgttactctggctctatatgatgagccacgtttttcaatacttgccataaatttaatcgtcctttcaaaagaaaagccgattatcttaccagcaataaagttagcagataaccgactatttctcaaatctttttcaattttgtttctttaagatcgatgaaagcttcgatacttttaatggtaaagcgttctgtgtgttctcctagtttaaatcttttaaagtcaggatcagagcgaaatactttatcaaaagttttgggatcaataccaatatattttgaagcttcttcgcgagttaataatttagccactattattctcctgagattgtttagttaccaatattgagataaaatctaggtagtaggtaatctagtcattgcttttgtctctattagcatgactagtatttttttgcgattttatcttccaaattgcttcggataatttatcatcagtgattagatcatttttaactttattagtattgcttttagtaagttgcaacgggataattcgtcttttcaactgttcaaaagaatcaatgacttgattagcaatattacattcaagataaaaactaagtggatcataaggggtagtgatgtaaatggcacgcgcatttagataacgatcgtgataccttgcgggagccattttgtctatttcccaaggatccaaaagggtaagtagttgaccatagtcatagtcatttggtcgcaagtcattaattactatgaatttttgccctttgtattcttgaaagtgatcccgttgactacctgaaatacagaaatcttcaggatgttgtttttctaaaatttcccgtactaacttagtcttaccaattccggaaacaccatatatccagtagaccttacaactctgacctttgaagtcctttaaaaaccgttgatgctttttgtaagctaggatgtcttcaatatgatctaacagtgttttatgttttgccatctcaagaacaccgatttcttcttgaagttcttctttagtgattttttcatttgaataatcatcaataaagttttcaattgcttgtcgtgatggctttttgactttttgtctaatctcattgattctatctttaaaatcaaatgaagctactacttcttttggatcataatgatgtttactcttagcattagtagtttcatggatcagatagctatagccattgttaataatactgtgccatgcttcaatatattgttcatgatcattgaaaatcttagatactcttgaaatggttttagcatctttgaaatgaagcattacatgatagtgaggtcgaatcttttaacttatctttactaaatggtaaatgatctaaatcttgggtatacataaagttgtgagaacgtattatttttttcacaattaaagatttcctttctattcaacacgaactacatattaactttggggctagataacaagttcattattactttatttttgtttatcagatggaaagcaattgcaagaagcagcagatatattagccaaggctaaggtgcatctatctatggtgatattttcaccttaaatcaaactgcagcagctatggttaaagttgctcaaggaggtaataagggtaaagtattactgcaaatgaatgaagcttaagttaacatgaaataataaatacatttagataaagaaagaccctcaaagattctaaatttgaatttttgagcgtctttttagattgctaatcattttaaaggtacttgtattacatttactcctgctttaataaattcattaattacactgttttctacaaaagtatcagttattaataaatcaatatcttttattgttccaatagtaaaattagagaatttattgaacttgctatagtcggcaacaacaataaccttttgtgattgctgaataatagttttattaacttctgcttctcccataactggtgttgaaataccttggttaatgctaattcctgcgcaaccaataattgcatagttggcacgtaaagatagaaatgctttagttgccaaatcaccgctcatgattaatttatgatgtatttccccacctgttaagatcactttgcttttagtattttcaaaatttccagcataaccattgttagtaacaattattatatcctttgttaataaatgtggaattgcatcaaaggctgtactactagagttaataaatactatatctccatcgtgaatatatctggctgcctcttttcctaagctttgcttaatgtaactaacgggctgagataatgggatttcttctggtgcaacaagggatatgacaccacgcttttttgaaatcttacccatttttgacaaataatcacagtctcgtcgaatagtcatttcagaaaccttcatctttttgcttaattcagaaatagaaatttcccttgtgtgatttagtaaatcaatgatttgcttgcgacgttttttaattacttgaattgaatttttcatttttaatgatctctttcacttcaataaatacttactaatacttcaccagaaaagcattaacttttgaatttaaataaaaaacgacccgaactggttactattttaccattcaaaataataattcacatattttatgttataaatgacttgaattttacaaaaattaacataaaatatgctaaattaacatatataatggttgaaagcactcacatctaagcgcataataacattgaagacgaggataagaaaattaaggaggatttattcatgtcagcaccaaaaaaaatagaagatgttaatttcaaaacttttgcagaaaacaatttcccagaatggggtacgttcttgaatgaacaaattgctgataagcaagtaccagaaaaaagtattgcaatgtggtggttaggctgtatgggggtttggattaagactcatgaaggcaccaacgttgctattgatatgtggaacggtactggtaaacatactcacggtgacggtaagatgcgtaaaggtcaccaaatgatgcgtatgaccggtggtgaagctttacaaccaaaccttagaaacaagccatatgtaattgatccatttgcacttcgtgatcttgatgctttatgtgtaactcacactcaccatgatcacttggatatttacactgcagcatgtgtaaacaagtattgcccagacgctaaatttattggacctcaaggcgttgtcgatgaatggatcgaatggggtgttccaaaggaaaagaccattgttgtaaagcctggcgatgaagtcaaggttggggccgcaactattaaggcaatggaagcctttgatagaactgaatttgttaccgaagatgatccaaacaagaagttagcaggtactatgccaattgaaatggctaaagttgctgttaactacttagttaagacttcaggtggtaacgtatatcactcaggtgactctcactattcaaacacttacgtaaagcacggtaacgaaaacgaaattgacgtaactctatgtgcatacggtgaaaacccacgtggtatcactgataagcttgacgactcacaagttttgagaatgggtgaagctttaaagacaaaagttattattccaatgcactatgacatttggactaacttctacagtgatcctaaggatattttagctctttgggaccgtaaaaagtaccgtttgcaatataaatttaagccatatatttggcaagttggtggtgaatttgattatccacaagacaaagataatttcgaatacatgtatgatcgtggattccatgatgcatttaagaatgatccagacttaccattcccagaaatgctatagtcccgtttttgttgattaactagctcaacgtctttaaccaaagctgttgagctgagggaggagacgctgatgttacgttactttttagaaaataatttattaaacattactgatgaacatcctgagacttgggaagaagcaattagagttgctggtaaggtaatgaagcaagacaagttagttactgatgattatattgattcagttattgctgatgttaagaaatatggtccatacattgttattgttcctggtgtggcaatgccacactcaaaggctgatagcgaaggagttttaggtactggtataggtcttacaattttgccagaaccagtttcattcgatgaatcagacccagataaaagtgcaaaattattctttatgctagcagctaaagataataatacacatgtcaaaaatattgcccatttatctgacatgttaatggaagataacatgattgatgatctttctaaggttaagaatttagacgattataaggcagtaatgaagaaacataatatgtgatatcggaagcggggagtataaatggctatattaaatattctatctaagatatgggattattttgctaccaatattttgcaacaaccagctttcatgattggttttattgtcttacttggttatatcttagagaaaaagaaatggtatgaggtcctttcaggcttcttgaaagcaacagttggatactttattttatcggctggttctgttggactgatcaatacttttagaccaattttagtcggattaaaagatcgttttcatttgaatgcgatggtaactgatccatattttggacagaatgcagttactgccggaattatgaaagagtttggtagatcttttgccgatactatgcttttgttgttatttgcatacattatcaatatcgtgttagtaagattttcaaaatatactaaattacgtgctgtttttacaactggtaacgtgcaagtacaacaagcggctaccgctttctggttgatcttgttctgttttccaaaattaggtcatttacctattttaatcgttatgagtattatcttaggtttatattgggccgttggttcaaacttaactgtagatattactcaagagttaactgatggtgctggctttgctatcgctcaccaacaaatgtttggtatctttattttcgctaaattatcagaatttttggaaaatagagccaaaaagaaaggtaagaaagaagccagacgattagaagatgtaaagttaccaggtttcatgtcaattttcaacgacaatatggtatctacatcaattttgatgttaatttttatcggtgcaattttagtagtattaggtccagattacttagttaaagctaaatttatgcaacctggccaaagttttattttctacatcttacaaacttcattacaatttgcagttttcttagcaatcttacaattaggtgttcgtacattcgttaatgaattgactgaatctttcactggtatttcagacaaatggttacctggctcagttcctggtatcgatgtcgcagctaccttaggttttggttcacctaacgcaggtacaattggtttcttgtttggtgcattaggacaattcacaatgatcattttattgttgattttccactcaccaacaattgttatcgccggatttatcccgttattctttgataacgctgctatcggtttgtattcaaataaccgtggtggtttcaaatatgcaatgatcatgccttttatttctggattgatccaaataggcgggtctgccttaattgctacctgggtaggtatggcgaaatacggtggttacatcggaatgttcgattgggctacagtttggccattcttcacagtattgatgaaattcttaggctttgttggtattgctcttgtaataatcattttggtaatgattcctcaattgcaatatcgtgccgataagaaaggttacttcatgattactgaagattatgaaggttggaagaagttacatggtaaagaatagaggttaattaaaatgaaaataatgtcagcttgtgctaatggttcgggaactagtttaatgctttctagaaccgcaagaaaagcaatggaacaattaggttatgaaattacagtttcagatcatacttctgtttcagaagctagaggaactgctagaaactatgatgtggtatttacatcattaccttttgtgaacatgtttgatgaagtaaagcaaaagggttgcgaagtaattggcgttaagaatgtaatgtcagttcctgaagtaaaagaaaagatcgaagcttcagatattccaaataagtttaagaaataatcttaggagaattaatttatggctttaccaatgttacaagttgctttggattgcgagagtactgctgaagctttaaatgtcgcaagacaagtaatggatcaagttgatgttttggagacaggaaccattctttgttatcaagatggtgtaaaggccgtatctgctttaagagcagtgggaccagataaaatagttttagcagatgttaaatgtgctgatgccgggactaagttcggtaaggcaagcaaagatgcaggtgctgattggatgacttgtattaacgctgctactgttcctaccatggttaatgctagaaaagaaattgaagttcaagttgaattatatgaaggctgggacaataaagaacgtatgcaagaatggcttaacaatggtattgatcaagttgtttaccaccaaagtagggatgcaaaatttgcaggccaaaaatggggcgaaaaagatgttgcaaacgttaaggccttgattgacatgggctttaaggtttcagtaaccggcggagttcatccggaagttttgaaattatttaaagacttaccagtgtattgttttattgccggccgtgatatcagaaatgcggaagatccacatgcgcgtgctaagcagtataaagatgaaattaagcgcatttggggttaatcattaattttactcatattaaaaaattccttaattagttttagaaagggcaatgcacgtaaaaacgtttattatgcattgctctttttgtattaaaaggcaggtataggttatgactgtaaactcattaggtatttacgaaaaagcattaccacaagatttatcttggaaagaaaaatttaatttagttaaaaaattaggcttcaattttttagaattttctgtagatgaaagtgatgcacgcttagcacgtttggattggaccaaggaacaaagaaaagaatttagagatttaatgtgggacactgacattcgaattaataatttgatgttatctggccacagaagatttcctcttggatctaaagatccagaaaccagaaagaaatctcttgaaatgtgccaaaaggcagtagatctctgtgtagatttaggaattcataatattcaaatggcaggctatgatgtttattatgaagaaaagagtgagaactctagagaattatacgttgaaaacttagctaaatgtgttcatatggctgcaaagaaaaacattatgctttcgattgaaacaatggatgatccatttattactaacattgcagatattaaacaatataaaaagcaagttagaagcccatggcttcaagcctatccggatttgggtaacctctctgcttggccacaaaatgatcctgctaaggatttagagaatggaattggtaatattgttgccatccacttaaaagatactctggcagtaacagatggttttgagggtaagtttagagatgttccatttggtgaaggctgcgttgattttgaaggactacttcgtgaattagtaagactagactataacggaagttttacgattgaaatgtggccaggtgataacggtgatgatgatcctgttgctgaagttaaagaggccaaagctttctttgacaagatctttaaaaaagttggaattgaacaagaacctgtagattagaaagtggaaaataaaatgttagaagatttgaaaaaagaagtctatgaagccaatatgcaattacctaagttaaatttagttacttttacttggggaaatgtttcagggattgatcgtgaaaaaggtctgttcgtcattaagccatcaggtgttccatatgaagaattaactcctgaggatatggtagttgttaacctaaaaggtgaagtggttgaaggtactagaaatccatcttcagatactcctacacatacctatctatataatcattttcaaaagattggtggtatcgttcatacacactcaccttgggctgtttcatttgctgcagctaagatggatattccagctttgaacaccacacatgcagatactttctatactgatgtgccagcagctgatgcattaactaaagaacaaattgaggaagattacgaaggtaatactggtgtcactattgtcaaaacctttaaagagcgtggtctcgattatgaagcaacaccaggtgctttagtttcacaacatggcccatttacttggggtgaaacaccagctaaggctgtttataatgctaaagtcttagaagttgtggcggaagaagactatcatactttgcaattaacacgtgctaattgccatttaccacaatacctacttgataaacactattatcgtaagcatggtaaaaatgcttactatggtcaaaataatgctcattcaaaagatcatgcaaagcgtgcctaaaactaaggggtaaaaaatgcttgaaaattatttttttgattttgataaaactctggctagttcaggtaaggcgtcattgattgcgacaaagcaggcatttaagttaaataatttagatgagccagatgatgatcaaattttagattttatgggtattcctgctgatgtttcattccctaaaatggctaatagagaattgtcagaaagtgatgcgaaaaaattagttgatacctaccgtaatatttatggaaagtatgaaaaagaaaatacacatttatatcctggaatgcgagatgtactagaggatttacagcaaaaaggtaaaaatttatttgttgtatccagtaaaagtcatgatattttaaagagaaatttagataatttgaaaattactcaatattttaaagactttgtgggatgcgatgaggttcagcattataagccagccccagatggtattttgatacttttagacagatacaatttgaataataaacaaagtgtaatggtaggggatgctcgttatgatttgcaaatgggcaaatcagcgtctgttaaaacttgtggagcagcttgggatgcttttagtgtggatagcttaaagaatgaacatcctgattatttgctatttcatgtggcagaattaaaaaatattgaatagagttcatatattttaaaattggatggtatcaattttgaaagtagttgaactctttagcaaaaatgatattattaacttgtaagggaaaacggttacataacgatggtctataggaggacatcatggctgtagattacgattcaaaagaatatttaaagagcgtcgatgcttattggcgtgcagcaaattacttatcagttggtcaacttttcttaatgaaggccccacttcttaaaacacctttagttgctgaagatgttaagccaaagccaattggtcactggggaactattgctccgcaaaactttatttatgctcacttaaacagagtgttaaagaagtatgatctggatatgttctatattgaaggttcaggtcatggtggtcaagtaatggtttctaactcatatctggatggttcatacactgaacgctatccagagatcacccaagatgaaaagggtatggctaaattgtttaagcgcttcagtttcccaggtggtgtggcatcacatgctgctcctgaaactcctggatcaattcatgaaggtggggaattaggttactcactttcacacggtactggtgctatcttagataatcctgacgtcattgctgctgttgaaattggtgatggtgaatcagaaactggtccacttgcagctagttggtttagtaacaagtttattaatccaattaaagatggtgcggtattaccaattttgcaaatcaatgggtttaagatttctaatccaactattgtttctcgtatgagtgacaaagaattaactgaatacttccgcggcatgggctgggatcctcattttgtttcagtctttaaaggcggtcgttttgacggtgaaaaggatccaatgcaggttcacgaagaaatggctaagactatggatgaagtcattgaagaaattaaggctattcaaaagcatgcccgtgaaaacaatgacgctactttgccacattggccaatgattatctttcaatgccctaagggctggactggtccaaagaaggatttggatggcaacccaattgaaaactcattccgggctcaccaaattccaattccagttgcacaagatgatatggaacataaggaaatgcttgaaaaatggcttaagagctacaagccagaagaattattcaatgaagatggttcacctaagaagatcgttactgaaaatacggctaagggtgaccacagaatggccatgaatccagttactaatggtggtaagaaccctaagcgtttgaacttgccagattaccgcaagtacgcattgaagtttaagccaggtcaaatggaagcacaagatatggttgaatgggctaaataccttagcgaagttgctgatcttaacccagacacattccgtggctttggtccggatgaatctaagtcaaaccgtttgtttgcacttcttgatgatcaaaagcgtcaatgggaaccagaaattcatgaacctaatgatgaaaacctagctccaagtggtcgtgtaattgattcacaattgtcagaacaccaagatgaaggattccttgaaggctatgttttgactggccgtcatggcttcttcgctacttacgaagcctttggccgtgtagttgattcaatgcttacccaacacatgaagtggttaagaaaagctaaggaacaatactggcgtcatgactatccatcacttaactttgtcgcaacctcaactgtcttccaacaagaccacaatggttacactcaccaagacccaggcatcttgactcacttatatgaaaagaatcgtccagaccttgttcatgagtacttgccatcagacactaatacgcttttggcagttggcgacaaggctttgaaagacagagaatgcatcaatgttttggtaacttctaagcagcctcgtccacaatggttctcaattgaagaagctactaaattagctgataaaggattgagttacattgactgggcttcaactgatcaaggctataagccagatattgtatttgcttcaactgaaactgaaccaactttggaaagtttagctgcaattgatatcttgcacaagcgtttcccagaccttaagattcgttacataaatgtagtagatgtgatgaaattaatgagtcctaaggataataagaatgctatctctgataaagagtttgatcgcttattcccaagtgacattccagtaatctttgcatggcatggatacaagactatgatggaatcaatctggtttgcaagaaaccatcataatatacatattcactgttacgaagaaaatggtgatattactaccccatttgacatgcgtgtcctgaaccaccttgatcgtttcgacttggctaaggatgctgttgaaagtattccatcattggcaggtaagaatccagacttcatcaatgaaatggatgacttgcttgctaaacaccaccaatacattcgtgataatggtaaagacattcctgaagtcactgagtggaagtggacaggtcttaagtaaaaaataaagtgtctgggaaaaaactaactcttagaccataataataggacgatcaaaattcttaagtgagttttaatcgtccttttttcttttaaaattaaataaaaacggtcttttggtcattttctgttccaatatttgcttatattcatcatcatgaaggctattccaacatcggtttcaactttctttttgcctcttagatgtgtttgccttcttcgctttgaagaacttcttttgctttttcttttaaatactgccagttagggttatagcgtacttgacgctggcgaccgctagctgtcttagctaattgttccagttctgacgtaagcttcaactgcctggcccttcagcttatcatgatacttttcgacagccttgcgccaaacaaaagtgtagcggttagcatcagcttcaattttagtgccatcaataaaaacagccccctcgttgatcagccaacagattggtaaagtagataaagctcttcttaaccagttcattggcatgactgctgtgtggtatactggtcgacctgttttagcagggtgtaaagcagaatagcttctggaatcgaatccacaatccagctgatagcattagccaagtgattgctgggaatggtaaaatccaaattgagtgttaaagctgtttgacctgtgatatgatttttgtacatattagtttccacctttttgttttaatgaaataagaggccacaaatgatcacattttttatggagaaatttaaaatgttaaattttagatcatatgaagacgcagatttcgaaaaattatgcaacatccacgatcaagcgcgaaagcaagaattaaaatttgccaatcttgaagctgcatttattccattcaaaatagcatcaaagaaagagcaattatttgaagactatcaagtttacgttgcaacaaaagaaaataaagttgttggttttgtcggatttaacgaagaagagcttggctggctctatgttgatcctaaagttcaaggacaaggtattggtagtaaactgattgattttacgcttgaaaattcgaccaggccattttatttagaagtgcttgagggcaatcctgcacaaaagctttatctcaaaaaaggtttcataacaattaaacatgaaagtggcaagatgccaggtaatgaatcatttagtgttgaagttgacctaatggaatataaataaaacatcccaatcaggtgtgttttttgttagacttataaaaaatgaagctagtcaataaagtattgtcttgtcattagaaagtactacatatgaagtatatttcatgaagtccgcttcatattttagggatgatgattatcaataataaaattaaggaataccgcaaaaaacatcaacttacacaacgcgagttagctgaaaaagttggtgttacagaacggacaataatttcattagaaaagggtcggtacaaaccatcgattgttttagcttataaattagtacaattttttgagacagatattgaaactttattttgcttaaatgagtatgtgaagaatgagcaagccaaaggaaggaatgcttacaattctttttgcgattctatcagtcatacagctcttagaattaatttatgatgttgcaaatagaaaaagcgtcaattatattcaagatgttatttggttaatattgggcatctgtttgacagtcggttatttctatagtactaaatatatcggtatagccaagattgaagaagatgatgaacgcgataaatttattcaaactaaaactaataatcaagcattcaatattttacagtgggtcctttttgttttaggtgcagtaacgataataattgatgttaatctcggccaaatgggattagattctcgtgcaatggttattatagttgtaggcgttgtattaatctttttatgggcattttcttggattttgcaattaatcttaatgataattaattatttttgcaattgagactacaaaaaataaagcgactggattagctctggtcgcttatttaaattttagtatggcatttctttaaaaaattagaatatcgatctttttcaccgtttaccttccaatattaaccattcaccgaaatttttaaatttaaaatattttttcgtctatactgataagcaagaaaggagaaaaagggatgaaggtaaaatttaacattgataatcaattagcgggagaaagtgctgaattttggttaaaaaagatgactaataaattcagtcaattgggtaaagaattaagtggtgaacaagacacgatttggtgcagttatgatgatgaaattattcctgtgaagtttgaaaatatttatttaattcaagtcgaacaagagcaaactttaatttatgacaaaacacagagttacaggtataaagggcaattatatcaggttaaaaatattttgccacataattttttaatagcgtcaagaagtgcaattattaattatcaaaaaattgatcatttggaagttatggatggtggcaatattgatgtcattatgaagaaccaaatgcgggtacaaatttctagaagaaaaattaaagacttgaaagagaggttagggttatgaaaagaatggaatctttcttggtaagtggaataagtggcatgggaattggattaacttggtattcaatagtaactttatttcaaacgggaacgaattggaaaaatgctcaaattccgtttacaagtttgctcttttatttgattgtctcttttgtgatgggagcatttttcaatttgacaggattgatttttgaacaaacgcaatggtcactacgaaaacaaattattgtaaacttttttgttagctatgttgccttttttgcttttgaattagtgattaatgatttggctttatcggttcatttcttcttagtaattactggagtatttgtcttgatgtacttgctcgcttatggtttgtactttttacaattattgcgagatgttaaacaaatcaatcaaaaattgaaagaaaagtaaataatcaaaaacgatcaagcctaaaaatcttgatcgttttttcgttggttagataaaaattataaactgtcttgaatattatcagctaagtagtcataaagcataccatgctttaattgcttagtatcaactcccaaagcttcagcaattgcataggcaaaggcccaagcggtagcaggaccacggcttgttaaaattttatgctctttatcagtaacggcgattttctctgaaaaatgagcacttggggcatcttttaagcattcttcttcaatgcctggataacaagtgaagtccgcatctgccaaaacaccatagcgagcaagagcacgtggagcagcacacattgcggcatcccacttgccagcttcatgacgcttaatcatcagatcacgtaatttttcattatcgcgtaagttagcagaaccagtcatgcctcctggaaaagcaaccaaatcataatctaataaactgtcatctacaactttgtcacaagtgatttcaatatgatggtcaccatctacttttttacttattaaacctaccatatcgcattcaacattaagtctacgcaatacgtcaacaacgcttaaaccttcgacttcttcgcaaccgtctgcaaatactacagcaacttttgtcataaaatcatcctttctataactattttaattatctacttacattagatctaagtaaaatgaaagatctgctaatttgcttaaatgaagagtaggatgaggtgaaattggtatcttgtcttttttaggtgccagccataatgattttagattggcattttctgcaccttgaatttcttcatccagattagttccaattactaaaactgtgtctggatcaatatctggattgtctttcagaatcttaaagaaaatatttttgcttggtagcttgtccgtaaaatcatcggcgaaataagcattgtcaaatgaagaaagcaattctgtaggtgcaaggcgcggttcgatttgagtgcgcttttctttagcaagcaaaatcaaatgcagcttgccactgacttcatcaataaagtcgatggcgcccttgactaacctggtttgatccttcattgcatcatcaaaaacagttcgcgttttagaaagatcttcttttaaaaatgtagataaagctaaatcgatttgatcatcgctagataaatttttaaattctttttctaagctagtgtagcgtagacgctcagctggtccccagtctaacccataatgttttaaagtttgccgcagcgcagttttttctgctaatttttcatttaataaactgccttctggaatgaaaattaaggtttcaaatgtagccatgaataaacttcctttgtgttagttcctattagaattataatgaactagacaattttaggaaaggaattaaaaaatgacaatctggaccgtaattttcttattattaggtggtgttgcaggtggcttattatcgtcagtggcctcaatggcatcacttgcatcatacccagttttgttagcagtaggaattccaccagtatttgctaatgtaactaatgatgcggcgctaatttggactagcatcggttcaactgtatcttctactaaggagttaaaaggacattggaagcaagtttggttctataccatttttacagttgtgggatcaattttgggttgtattttgcttctatcttttcctccaaagatttttgaaaaagcagtaccgttctttattgctttctcaggcctaatgattattgtttctggtaaacaccatagtttaaatactaagacacagcctacttggcttaaaataatttattttctcgcacttttagtcatggggatgtatacaggttacttcggtgcagctggtggggttattgtactggtacttttaacttatattactaatgatcgatttattgttattaacgctattaaaaatgtgatttgtggttttgccaatttggtagccttaattatctttatgtttacttcgcatatttattggcttcaagcgattcctttggcaatcgggatgttcattggtggctatattgggccagcaattttaagacgagtaccggaaaagccagttcgaattttcattgcaagtttggccttcattcaagccggttacttcttttatacggcatacctgcaataagtttggtacaatattaagcaatgaaaagggggctaaggttgatggcaacagaagtttatttggtacgtcatggtgaaacaatgtttaaccaattgaacaaagttcagggttggtgcgattctcctctaaccgtgaaggggattaacgatctaaagagaaccgctaaggccttgagtcaagttcactttgataacatgtattcatcagatttgaagagagcaattgataccgttcacttgatgaaggatgctaatgtggtctcggatattggtaaaattaaaaagctgcctgaatttcgtgaggtcttctttggaacttttgaaggcgatgatattaaccagacttgggaacaagtagcactagccgcaggaattggccatgaagatgatgtaactaagatcatcaatcaggtaggcttgcgcaaatttcgtgcagcgacaaaaaaggctgatccgcgtcatttagcggaaaatcaggatgagttagatgagcggatggtacgggcaattgacgttttgcgcgatttaactaaagatgaacaaagagttttgttagttagccatggtgactttattaaaactttgaccataaaatattggaataagagtaatggcaaaaacgatattgtttttccaaataatgggagcgttactcgtggaattttgcacgatgacggttcatttgaaatcgttgattataatgtagatgctgaagagctataaaagtcctactgccgaagtagggccttttttggtacactgataacgaaaggaaaatattttatgaataaagatcatacaactaagcgttatgtcttcgtaactctactgaatgttgttattactattgctgaatttataggtggtattttttcaggttcattagcactgctttcagatgcagttcataatctgagtgatgttggtgcaattattttatcttttgtggcgcacctgattagtcgcaaaagtcgtaatcagtttaagacctttggttatgaaagagctgaaactttagccgcttttactaatggcgttatcttgatcgtgatcagtgtggttttgtttgttgaagcaattcaacgtttctggaagccggaacatattcacggtggcattatgctgattgtctcgattattgggctggctgccaatattatttcaatgctagcaatgcatagcgattccaaggctaatttgaatgtacggtcaacttttattcatatgttaagtgatgccttgtccagtgtagcggttgtaattggtgcgatcttcatttacttctggaatgtaacttggcttgacccggttttgactattttagtttcaatctttgttttgcatgaagcttatgaaattacaatgaaagcagccaatgttttgatggaatctaatcctgatatcgacttgaatgaagtgaacaagattgttttatcgttccccatagttcaaaatatccatcatgtccatgtttggcgctacagcgatgactttattatgatggacgcgcatattaatgtagccccaggattaagagccgatgaattagagcagctataccaagatattggacaggagttacaaaaagagttaggtattaatcatattaccttacaagcagagtgcgagcgtggcagaaaagacaagatgatcgttccaggccacggtattaacgaagattaggtgaaagaatgtttaatgttaatatttttacagcgattattgtattgattatgggtatttatgacatgtcctatgcttttaataggcgtaagcaacctaccaataaaggcggcattagagcctttatggctttaggaattatcttcacgatcgcaggaattgttatgatcgttagagtattaatgaagtaaggaatcttagaatggctaaattagtattagttcgacatggcgaaagtgtggcaaatgctgccaatgtttatactggctggaacgatgttccgttgactaaaaaaggtgaagaacaagcagaaaaagctggtgaattgattaaaaccatttcggattttgctcccacccacattcatacttcagtcttatcccgtgcaattgtgacagcaaatatagtagccgatgtctgcaatttattatggctaccgatgactaagacctggcggctgaatgaacgccactacggcgctttaaggggccttaataaggacatttcacgtaaagtatttggtgtggaacaagttctattgtggcgacgtagttttgattcagttccacctaagcaggggtcgccaatgattgatcgccgttataagcattttgatcagcatttgatgccacgggcagaaagtttacatcaaactcagaaaagactcatgccatattattatgatcatatcgcatctcgattgatgaatggtgaagaccaactgatcgtagcccacggttcaagtttgcgtgctttgataaaaaagctagagcagattaatgatcatgacatcgtaaaactggaagttcctaatgcggaaccgattgtttatactatggatgatcacttaaagattattaacaaacaaattttacgtaaataatgttaaaaatgcaccttagtgcatttttttaatgctctaaatgaggttttacacatatctatggtaaaatctattatgatttctagtatatttagtttggagtattaggcatgcgtaaattatttttattacgaggtgcacctggctccggtaaatcttcttttattactcgccatcacttaaatccttatgcgatcagtcgtgatcaaattaggctactattggcggatttgacagtttactatcaagaggatgcggatgttttacaccaagtcattccgcggcacgtaactgtgcgtactgagcaaatggtggatcaccttgtagaacacaagatggaatatggggaaactgttattgtggatgggacgcatatcgttccaagtgcgattgaacattttaagccttgggtagacaagtatcactatgaatgctttgtagtagatctgatgcaacatactaccttagagagtttgcttaagcgtaatcagactagaatgcattacgattgggttaagcctgaagtggttaagcaaatgtatcgttcttatgaagcacatccagaagtaccatactgggcacataaagttgtgccaaatcagatggatcatgcgttgtcacagcgtgagacaaatttagatcgttatgctcatgtgattgcggttcctgacatggtagatgaagaagattttccacatgtgcatatctcgaacttttatttttcatttaatgacaagtttacagaaaagtatggaacttatcgaaatgtagtttcaattgctaaaactgaagatgaagcagttaagcagttcaagttgccatattttgtctttaagtttcatcacaagcactttttgatttcagcttatccaattcgaaatgagatgttggatccgatcagaaaggttaagggagtttggacatattcaactggtttgtataatgtagcggattttgtgaaagaatttccggaaaataaaaagcaacatgtgcatcagttcaacttaagtaagttagatccaacccgcttattacatatttggtaaaaaagacgtagttagaacattttatctaactacgtcttttgtgtaatttacttatattttgttttacttcaatttgccggccttagctaaaacttctttagccttttcaagtgaatggtgttcttcacgataacgcttgatgtcatagccatcaacatcggttaacttgctaagtctatcatcaaggtctttgaattctttttcaagatccttaatgacgccttcttcatcttcaacgtaaacatactcattttcatcagctttggcatcaatcttagcatcgtattcgccgacttttctagcatgtttcaaaatagatttaatatccttaatcgtttcatgttgtgcagtacggtgacgacgatcaggtactgaatcttcaattctagcaaggtgactttcagcatcctcaatcttcttagaaattctatttaaggcttttaattgtctttttgaataatctgtcaagttttatacctcctagataaaatgataagctctactaaatgcgctttcattgtaattagtaacgaaggtataagcaagaattaacacttatgaataaaaagagttacgccttaaaaacgtaactcttagaagttttggattaatatttaaaagctaaggcacccattggatcccatggcaataattgaattgggttatctttgccttcatcgtaagccttcttaagatcttctggtaagaatttcttgttaataactgcttggtaaacaaatgaatcaaaccaagaatcactcattacgaagtaacccttaaagccagttttttcaccccatgagttttcgatcttccatttagttggcttaccgtcaacgatatcaacaccggtaatcaccatggcatggtccatcatgctttcaccagaatcaagcatgtcggctttagacatagtgaagtcagcatcaaataattgatcacggcggtaaaggttagtatcaagaagtccagcacggcgttcagaatccttaactacgtttgaaccgaaccaaacaacttcgccactcttcaattgtttaatgattaagtccttcatttcatcaactttaaggtttaagtggcgaacttggcgaccgccttcaacgttacctaagtattcaactgagaataccttgtggaaaggtttgtcgttagttggagcattgatagttgagatatggtttgctaaatccatgccaacgtacttgtcaaagaattcctttggggtaatgtccctgtcaatatggtaattcttgtcatcatcgcggtattcgaagttgaacttctttggtggaacacccaatgaagtagccaaaatacggaagacatcgtttagcatttcttccttgcgagcttgtacttcatcttctgacttgccatcttgaactaatttacgtaactcaagaccatctttacgaagcaaagtatttaaagtgtcgtttaatgcacttgaattagtagcattagcagtttctggataaacactcttaggaacgataccatatttttcaataataccgcaaagcatgtcccattgaccgccgtcttgttgaggagtcgcaaataagaatgaaactttacgatcgcccaagtccttatcagcagttgcgatcacattttcaaagaaccagttagacttttcaaatttatcccagaagttagtgtaattttgagataattcgaagtcctttaacttaaatttcttttgtaatgggtgacgcatagtgtttaaagcactgaacatccagcagcgaccagactgcttttgatcggcagggttacctgtatcaatttcgattgagaaggttggatctaggtcgatcttagtttgtaagttttgactagctttgtagataccgttttcttgagcagcgtgactagccacatcaaaaacagggtggttagctaagtcttgttcaaatttattaatagtatcattgttgatttcttttaccataaaaaaatcctcctttataagtacttaaattaattttatcttattcaaaatgagtcgtctaataatcttatcgattaaatggacgatgataccaaattttgtgaaattgaggatgctgggtgaagtagtcaatgatcataggatcaagcggcaaaatgggtaagttagtttcttgagctaattgccaaactttttgcatttgtttttcaagcaaatcctgactattaaattgtggattaataaaaaaatggttcattatccagacattactgtctttgcgagcgattttatctaaggtaacgctagataatagtatgtcttcttcattttttatagtgaaaatttggtgcgtatcttgcttattcataaaaaattccttttttaaaaaataatctcatttttttgcgtaataaataatagagagctatttattttgtgttgactaaaaacattgtaaaatagataactgtcaaaataaaagataaatggagctttggaatgaaaacacgtggatttgaagtagtcaaaaagtatcaagatcaggaaattaatcttcctcgcagacagaccctagccagtgcaggctatgacatcgaagcggctgaagacattactatccctagcatttggcgactaaattttgtgcgaatttttaggttgattagaaatggacaccagctgtatgagcgcgactatgagatggcggatcagattttaaagccgttgttagtgccaactggacttaaagcttatatgccagaagatgaagtgttgattttagctaatcgttcatctaatacttttaagcgtaatctagctttgccaaatgggatcggcgttatcgatgcagattattacaataatcctaacaatgagggcgaaatttttgtacaaatgattaattatggcgtacggcctttgcacatcaagaagggagaccgtattgctcaaggcatttttatcaaatacttgaagaccgacgatgatgatccaattagtcgaaaaagagttagcggctttggatcaactaatgaaaagaagggtgattaatggctagagtaaaaacacaatataagtgtcgttcttgcggctatatttcggcaagttatttaggccgctgtcctaactgtggtgcctggaatcaatttgaaaaagaaactgaagaagtgcaaaagcgttctactaaggcaactgctagtcgtttgattcagaagactggattaaatgaaccggtaaagctggataagattaaagctgaaaaagaagaacgaattgtcactaaatctgaggaattaaaccgcgttttaggtggtggtattgtaccaggctcactagttttaattggtggagatcccggaattggtaagtcaaccttgatgttacaaattatgagtgacttatctgaaaaatataaggtgctttacgtttcgggagaagaatcagctaaccaaatcaaattgcgggctgaccgactgggtgtaggtcaaagtaatatgctcttatatccagagactgacatgcatgatattcgcgaacaaatcaatgatgttaagcctgactttgttgtaatcgactccattcaaactatgaatgaaccaagtcttgattcgatgactggctctgcctcacaggttcgtgaagtaacaagtgaattaatgaaaattgccaagatggatgccattacagtttttgttatcggccacgttacaaaagagggtgcgattgctgggcctaagatcttggaacatatggtggataccgttctctattttgaaggggatgaacaccattcttaccgaattttgcattctgttaaaaaccgttttggagcagcaaacgaaattggaatgtttgaaatggttaatgaaggcttaagagaggtaactaatccatcatcaatttttctggaccaaagattacctaattctactggctctgctgtggtggtatcgcttgaaggaactaggccacttttagcagaaattcaggctttggttactccgacagcttttggctatgctaaaaggaccacgtcaggtattagttttaacaaagcttcattgctgctagcggtgcttgaaaagcggggaaacttaatgttgcagaatcaagatgtctatttgactgcaactggtgggattaaattgaatgaaccagcaattgatttagcaattgccatggcagttgcatccagttataccgataaagaaatttcgccgacagattgttttgtaggcgaagtgggcttaactggtgaagttcgccgagttgataaaatcgatgcacgagtaaaagaagcggctaaagtagggtttaagcggatctttattccacggcataatatgtattctggattaaaagatcatggcattgaagtaattcccgtttcgagtattccccaagctttaaaattagtttttggctagcattaattgaattcttactatataacgagtaaactaagattgtttgaatttactattttttgaaagaggcatgaattttggctaaagaaaaaatccgtgtaagatatgcaccaagtccaactggtcacttgcacattggtaacgcacgtactgcactttttaactatttattcgctcgtcataacaagggtacgatggtcttgagaattgaagacaccgaccaaaagcgtaatgttaagggcggttctaagtctcaaatggaaaaccttcactggttaggaattgactgggatgaaggtcctgataagggtggcgactatggtccttatcgtcaatcagaaagaaaagaaatttaccaaaagtatattgatcaattgatcgatgaaggtaaagcatattactcatacaagactgaggaagaacttgaagcacaacgtgaagaacaacgtgctgcaggtgttgcacctcactatacttacgaatatgagggtatgactgctgatgaaattaagcaagctcaagatgaagcaaaggctaagggcttaaagccagttgttcgtatccacattccagaaatggaaacttattcatgggatgatattgttaagggacaccttgagtttgaatcagacactattggtggggatttcgttattcaaaagcgtgacggaatgccaacttacaactttgccgtagttatcgatgaccacttgatgaagatcactcacgtacttcgtggtgatgatcacgtttctaacacacctaagcaattagttgtttatgaggcacttggttgggaacctcctaagtttggtcatatgacattgatcattaattcagaaactggtaaaaaactttctaagcgtgacgaatcagttcttcaatttattgaacaatatcgtgatcttggttacttaccagaagctatgtttaacttcattactcttcttggttggtcaccaaagggtgaaaacgaaatctttaacaagcgtgaattcatcaagcaatttgaccctgcacgtttgtctaagtcacctgctgcttttgaccaaaagaaacttgaatggattaacaaccaatacatcaagaaggctgatcgcgacactttgcttgatttagctttgaacaacttgcaagaagcaagtcttgttgatgagcatccaacaccagaaaagatggaatgggttcgtcaattggttaacatctactcagtacaaatgtcatacactaagcaaattgtagacatggctaagattttctttgaagaagctaaggatctttcagacgaagaaatcgaagaaatcaagaatgatgatggccgtggtgtaattgaagaattcaagaagcaattagacctcatcccaagatttacttcagttcaaatcatgaacgctattcaagcaactcgtaaggctactggcatcaagggaagaaagctctttatgccaattagaattgctaccacgcgttcaatggttggacctggtattggcgaagcaatggagcttttaggtaaagaacgtgtattagaacacattgatttaaccttgaagcaaatgagtgctaataatctttaattagataaattgaaaaagaggctgcaaataaatgcagcttcttttttcatctgctaaaataaaaattagttattttgacagaagggacaagtgttagccgtgagagtttataatacactgacgcgtaaaaaagaagaatttaagccattagttccaggacatatcagcatgtatgtctgtggaccaacggtgtataactatattcacattggtaatgccagaagcgcaattgcttttgacaccattagacgctattttgaatataagggttatgacgttaagtatgtttctaactttactgatgttgatgacaagatgatcaacgaagcgagagctgaaaaaacgactgtacccaaattggctgaaaattttatcaatgcttttttggctgatacgacagcgctaaacattgagccggcgactttgcatccccgtgcaactcatgaaattaatgacattatcacttttgttaaaagcctaattgacaatggctatgcttatgaagtagacggcgatgtttattatcgtgccaaaaagtttaagcattacggtcagttaagtgatcaaaatattgaacagcttgaagagggtgcttcagagcacattaacgatacagaacaaagccgcaaagaagatccaatcgattttgctttgtggaaggcgcaaaaggaacccgatgaaattgcttgggattcaccatggggcaagggacggccaggctggcatattgaatgttctgtcatgagtaccaaatatttaggcgatacgatcgatattcatggtggtggtcaagaccttgaatttccgcaccatgagaatgaaattgcacaaagtgaagctaagaccgggaaaaagtttgttaattattggctgcataacggttttgtaactgtcggtaaagatcaggaaaagatgtctaaatcactgcacaatttcgtaacagtgcacgatattttaagggaagttgatccgcaagtactgcgcttcttcatggctagcgtacaatatcgccgccaaattaactattctgctgaaaatttagcacaagcagctacaattttagatcgctttaaaaatactttgactaatattaattaccgtctagaagatgatacagctagtgaagaatcagccgaattagcacaggcgattatggcaactaacgaaaaatttgaacaggcgatggacgatgactttaatgtccaaaatgctttaacagctatctatgatttgttgcctgtagttaatgccaacgctaatgctgctagagctgacaagcaagaattgcaaaagtttaaagagaaattagctagttggttattagtgtttggcgtggatactaataagctttgcgttaaaaatgctggctccaatgacgatgaaattgacgctttagttaaaaagcgtgatgaggctcgagcaaataaagattgggcaactagtgatcaaattcgtgatcaattaaaggaaatggggatcactattcaagataccccacaaggaactaggtggactcgtgactaaaataaaaaaactaacggaagaggatgttaatccggatactttaaatggacaaactttagcctatttaggggatgcagtgtatgaattaattattcgcagacacctagttaaaggcggtatcgttaaaccacaagtattgcagcgtgaagcgactcactatgtttcagctaaagcacaagctgcgttggtaactaagatgcaagatgaagaaatgttaacggatgatgaattagctgcttttcgtcgtggacgtaatgctaaaagtcatactaaggctaagaatactagtttgaaaacataccaattatcaacaggctttgaagcaatgattggttatcttgatttactggggaaaaatgatcgagtggcagacttaagcaagtggtgtattgatactgtagaagaggacgggctgaaaaattatgacttcaaataaagattttgtctttggacgccatgctggacttgattatttaaaaacacaaagtgccgacaagattaataaggtttttttacaacacggtgtacaagaagaatttgctaatcaagtttatagtttagctaaaaaaaagcgtttagttgttcaagacgtgcctaaaaataagcttgatcgtttggttgctggtggcaatcatcaaggtctagttttagcaatttctagctttgaatatgcagatttaaatcaattgctggacaagtatgatgcggaaggtaaagaaccatttttattaatgttggattctattgaagaccctcacaatctgggatcaattttgcgttcagccgatgctactggcgttgacgggatcattattcctaagcgtcacgcgactggcttaacttcggtagtagctaaaacatctacaggagcaattgattatgtgccagtagcgcgcgttaataatttagttcaaactactaaagaactgaagaaacgcggttactgggtctttggaactgatatggcaggtactgattatcgtgaatggaatgcccaaggcaagactgtactcgtaattggtaacgaaggtaaaggcatcgccccattacttaaaaagcagatggatcaaactattactttgccaatggttggtcacgtacaatccttaaatgctagtgtggcaaccggggtattgctttatcaagcttataacagtagaaatccattagtaaaataaacagaaagtagacaaaagtgtgagttttgtctacttttttagatacataaagctcatttctgtccattaaacatgtgttttcttctcaaactcaggggatagtctgtattctttgaggtggaggataaattgaatgattaatgaagagaagctgattaagaaagtacgggcaggagatgaccaagctttagaaaaattgtttcatttatatgagccgttagtaaattcaatcgtgaagcaattctatttgcatcattatgatcgtaaagactgggatcaagaggcaatgattgtttgttatgaagcagcactagttttctcgcctaaaaaggggaaatttagcagtttatataaaactaaattgtttaatcatgcacggaccttggtacgttacaatatggcacgtcgcaggcaaatctatagtcaatcgattccgctagaaaaggcggacattcaaggaagcgtgaatgaaccatgccgctctgaattatcgattccagttgatgagacttacaataattttgttaatagcttgtcacacgttgaattaattgcattattaaccataattggcgagataagtacagagtatgcgattgatcatctaaatattgaagcaatgaagctggtcagagctcgagcacgaactttacagaaaatgcggaaagtgcttttttgatagctgatcaaaagaaagtgcggtataataagtaatgtagaatattttaggaggtaatttaagatggcagacgaaattattaagactgcattgttagaccgtcacatgaaggaagcttttgactggagtgattcagatatgccagttagagatgccctttgggactactttatggaaaagaatggtagagataccatgaagacggaagaagatatgcttccatttttgaaagactcagacgataaaatcgaagccttcgttaacgaaaatcttaagaagtaaatccgactaaaaaacaatgttctacgcaccgtggtcacgcatagttttgaccactaagacagctaccttctccggtggctgtttttttatactaaaattaagaaagaattttaaagatgaaatatataattggcatagacataggaactactgcgactaaaggtgtgttgtatggcgaagatggaagtgaagtagctaaattggcaatttcctatccattgattcaggaagaagcgggacaggctgaagaagatccacagcttatttttgacgcggtacagaaaatgatttatcaattaagtcagaaagcatctggtcaaattttggcaatttcttggtctagtcagatgcacagcttaattggcttaggtgaaaataatgagttactgacaaacagcattacttgggcagataatcgtagtagtgatgtagtgcagcgggcaaaaaagtcgggctgggcaagaatgatttatcagcaaacggggatgccgccacatccgatggcgccagtgtataaattgctgtggcttaaagaagaacagccaacactttttgcacaagtaaaaaaatggattagtatcaaagaatatattatttggggcttaactggaaaaatattaactgatacaactatggctgctggcagtggaatgatgaatttaaaaacgctgacctgggatgaaaagatattggctcagattgggctagatcaagttcaattgccgacaattgctgatcaacaatctactgtgggtaaaattattccagaatatcgtgctaaattgggtttaaatgatgaaactcaaatcgttttgggcgcaagcgatgggtatttgtcaacgattggtgtcggcgttttggatgagaaagattttgcattgaatgttggcacttctggtgcggttagagtaattgcaccgaaggcaattgttgatcaaaagaatcgctttttctgttaccctgttgacgccaaacattatttgcttggcggccctgtaaataatggtggaattgtgttcgattgggccagaaaaacaatttttggcccagatgaaacggcagaggacgtcttaaatgtggcacaaactgctccggctggaagtaatggattgttgtttcatccttatcttggtggtgaacgagctccaatttggaatgctcaagcacgtggatcttttgttggcttgacgcgaaatcacactaaaccgcagatggctagaagtgttttggagggaattgtttttaacttgcttggcgcctctcaaggattgcttgatcaagtgggacagcctcaagctttacgtgttactggtggctttgtgcaaagtgattttgttagacaattaatcgcggacatttttaacttaccagtgattgtaattaaaaatgagcagtgtggtaccctagcagctatgtttttagctaaaactgcattagaagataagccagacctggaaaagattaaaaagcgtactgccgaaagccaagtttattttccaaatccccaaaatgtagcgatttatcaagaattgattctcgtttatcgaaaaattgagcatgaacttgaagcctcttatgaagatttggctcagtttcaagataagcatccacagaaatttgagtaaaacaaaaaagacgcattgcgtctttttttcatagattgattaactattaagcattttcaatatcttcaacaatctgatcaactgtcatacgattgtctttcaaaatttctttcaaaggtacttgatcagtatagacacgtttttggccgtagttgagtactttaatatccttgtcgccaaggtaggaagctactttttcaccaaaaccgccgtccaaaatattgtcttcaatagtaacaataactttgttttcttgagtcaatttgtctaaagcggcagtgtctaaaatattagcagaaactggatttactaagctagcacctgtcttttcagccacctttttacctagcatatcgtacatatcacctaacgctaaaacagcaacatctttacctggtttaatgtcgtacttgatttctgaatagtcaacagcagtaatttctttaccttcaggaacatctttggtaggcatcttaattgctacaggatgcttcttttgcttaatagcccattccatcattgccttttcttcggctaagttagttggagcaaggtagatccagttaggcaagttagaaatcattacttgatcaaacacacctaggtgagtcttacttgtgccagaaatgccaccaccagcaaccatcattacaactggtaaatcattagcggcaacatcgtgtgataattgatcaaatgcacgttgcaagaaggttgaattttcaaataaaactggagttgcaccttccttagccattccggcagcgaaggcaacggattcttgttcagcaattcctacatcatggtagttttcaggatatttgtttttaattctgtctaagccgaaaacgccgggaattgcggcattgatagccatgatcttctcaccattattgatgtgatcttcaagaacatcgagtgcaatagagctagcggtcggaccttcaggcattgctactgtcgtcttgtcagtctttaaatcgaatggcattacccagtggtgtgcttcttcgttgtcgattgcaggttgataacctttgcccttgagagtgttgatatgaagcaaaatagggtgatcaacatttttaactgctttaaaagcatcgatcattgattggatatcattaccatctgcgacataacggtaatcaaagcctattgcagtaaatggattttctttggtttcaccattagaatcacgtagtttctttaaagcagtaactaagccaccgacgttatcatcaattgacatttgattgtcgtttaccactacaactaagttatgcttttcaattgcagcgttgtttagcccttcataagcaaggccaccggtcattgaaccatcaccaattaaggccatgatgttttcatgtttgcccattaaatcgcgtgctttagccatcccagttgctaaggcaattgaggtagatgtgtgaccgacggcgtaatagtcatatgggctttcatcagggttgctatatggagttacatcttcatagtggtctggatcaagccaagcgagtgcacgtccagttaacattttgtgcgggtaagtttggtgggaaacatcccagacaatcttgtcctttggtgcatcaaaaacatagtgataagcaattgtagcttcaacgattcctaagtcgggacctaggtgaccaccttcagcggcatctttttctaagattagagtcctaatttcactggctaacttttccatttctggaagagataatttttttaaatcagcaggaccagaaattttattcaatagatattcaggatgtttatttattattatgtcctttctaacaagtagttacacttattatagataagcaaaaatcaaaataaaaatatttagttgtaattgagctcgattacttttagtaatgtaaatcagattattgacgtaggaagggacaacagtataaaatactgagtaagtatgtgtttttataaaagtttggaagtgagattatggcagtgaaaaaagcagccttagcctgcagtgtttgtgggtcacgcaactactcaatcaccgcaagtaagaatcgcactcagcgacttgaacttcaaaagttttgcaaacattgcggtaagaaaacattgcataaggaaacgaggtaaataaagctaatgattaagttttttaagagtgttggtcatgaaatgaaattggttaaatggccatccgcaaagcaaaatagacgtgatacagcaactgttattactagttcaattttatttgcggcatatttaggtgcacttgactggctcttcacttggttgactcaaagattaatgtaattgctagcataattagaaattatcagcgattcatgctataatattgacagctaaaagaaaacctctgtgggaggtttttttgtttacctaaaatttaaggagaaaaatatggtcgaaacaacacaaaagaaatggtacgttttgcatacttattcaggctatgaagacaaggttaagtcagacttgttgtcacgtgcacaaagcatggggatgcaagactacattttccgtgtaatggttccagaagaagaaaaagtagaaaccgttcgcggcaagaaacaagaaattgaagaaaagattttcccaggatatgttttagttgaaatggtaatgactgatgaaagttggttcatcgttagaaacacacctaatgtaactgggttcgttggctcacacggtggtggctctaagccatcaccacttcttgatgaagaagtaacgcgtttgcttaagaatcaaggtcaacctgctaagaaaccagtagttaactttgatattggcgaatcagtaactattactgaaggtgcatttaatggcatggtaggtaagattactgatattcaaccagataagtacaaattatacgtatcagttgacatgtttggtcgtgcgactactgctgaacttgattatgatcaagttaagaagcttgacgaaaacgaataatatttagaatttttagttgtaattgtacccaaacgatgttattctaatacggtacgtttattattgtgggaggagaaaaaaggaaaattctccattttaaccgcatcacggaatcaaggaggttttgaccgtggcaaagaaagttattaacgtagttaagttacaaatcccagctggcgctgctaccccagcacctccagttggtcctgcattgggtcaagctggtattaacattgttggttttactaaggacttcaatgctagaaccgctgaccaaaagggcatgattatccctgtagttattactgtatatgaagatcgttcattcgaattcattactaagactccaccagcaccagttcttttaaagcaagctgctaagatccaaaaggcttctggtgaacctaataccaagaaggttggtaaggtaaccaaggaccaagttaaggaaattgccgagactaagatgaaagaccttaacgctgctgatattgaagctgctatgcgcatggttgaaggtaccgctagaagtatgggtatcgaagtcgaagactaatcctgttatttaggtaacaaattaggtgggagagttaagagaagctcgtttgaccacatatacaaggaggaaatcacatgccaaagcatggtaagaaatatttagatgctgccaagaaggtagactcaaataaattatactcagtagcagaagctatgaaacttgttaaggaaacttcatacgcaaactttgatgctactgttgatgtagcttacaacttaagcgtagatcctaagcaagctgaccaacaaattcgtggttctatcgttttaccaaatggtaccggtaagacccaaaccgttgtagtatttgctgaaggtccacaagctgatcaagctaaggctgcaggtgctgactttgttggctcagatgacttggtagaaaagatccaaggcggctggttagactttgacgttgtagtagctactccaatgatgatggctaaggtaggtcgtttaggtcgtattcttggacctaagggcttaatgcctaaccctaagactggtactgttaccatggatatcgaaaaggctgttaagaatgttaaggctggtcaagttgaataccgtgttgaccgccaagcagctattcacactcctattggtaaggtatcattcactgaagaccaattagttgaaaactttgacgcattacgcgacgttatcttacgtgctcgtccagcttcagctaagggtcaatacattaagagtgttgctgtttcagcaacctttggcccagggatcaagcttgatccattaaacttggactaatttaaaatagactattaaaagcctcgctattgcgaggcttttttctattcattgacctattattttcgaacatggtatcataaattgaacttacaaatctatatattaaggataatgtcatgaaaaagcattctattggaaaactagtcattatgttggtgctaatgctagcttttgttacgggctgtgctaataatggttctaaaatcactattgttggttcaagtgcaatgcagcttttagcagaacaagcaggtaatgattatcgcttaagtcatcaagacagcaacattgtcgtgcagggtggaggatcaggtacaggattgagccaggttcaagctggtgcagtccagattggaacctctgatgtttttgccgaaacacaaaagggaattgatgccaagaaacttcgtgattataaaattgcagtagttggtattgttccaattgttaataagggtgtaggtgtgaaaaatgtttcgcaaaagcaattgaaacagatcttcactggtaaattaacgaattggaagcaactaggtggcaaaaatgaagccataactgtgatcaatcgttctaagggaagtggtactagatctgctttcgaagatataattttacaaggaacaaaaccagttaagtcgcaagaacaggactctaacggtgccgttaaaaagattgttaattcaacgcctggtacgattagttacttgtcctttccttatgctcatgataccaatattcaaaagttgagtattaatggggtaaagccaactaacaaaaatattactactaataagtggaatatttggtgttatgagcacatgtacactaagggtaagcccaacaaacaaactaaagcgtttattaattatatgttaggtgaaaaagtacaaaaagatcttgtacctaagattgggtacctcagtatcaatgaaatgaaagtaactcgtaatagcaagaatcaagttacacaaataggaaaatagttcatggataagaaggataaattaaaggaagttgttgatcaagcaattgctagtcaacacgttccacacgttaaattaaaaaagatgggtccgactagtgttgatattgataaattaaccaagccatctaaagagactcatcaagaatattggggcaagggtttaacttacttggcaattgttttgattattgtcttagttgtctcaattatcggctttgtcggctatcacggcttggctacttttgtcagcgatcatgttaatgtcattcactttttgacttcaactgattgggacccgggtgagggcaagaatcatgttggtgctgcggtaatgatcgttacttcgttcttagtaactcttttagcagcattggtagccaccccgtttgcaattgcaatagctctttatatgactgaatattcatctaaaaagggtgccaatttcttacagtcagtgactgaattattagttggaattccgtctgtagtttatggtttcttgggattaactatcatcgtgcctgtgattagaaaactatttggtggaacaggttttggtattttagcagctacgttggtgttgttcgttatggttttaccaacaatcacatcattaacggttgatagcttaaaggctgtaccaagtcattttagaaaagcttcaatggccttaggttctacgcattggcagactatttatcatgttgttttgcgagttgctacgcctagaattttgacggcggtaatcttcggaatggcaagggccttcggtgaagctttagccgtacaaatggttatcggtaatgccgtcttgatgccatacaatttggtcagtccatcagcaacattaactagccaattaactagtcaaatgggaaatacggtcatgggaactttgccaaacaatgcattatggtcattagcattattgcttttaattatgtctttggtatttaatttcctagttaagttaattggaaagaagggacaaaagtaatatggatgcaaaaaagaaagataaattagctacggcgattatctatattttggtaggaattgttgtattaattttggccggtatcctaggtgatatcttgattacaggtattccacatttgtcctggcgctttttgagttctgaagcctcatcataccaagctggtggtggggtacgtgatcaacttttcaattcaatttatttgttaattttgactactattatctccttaccaattgctttaggagcagcaatttatctagcagaatatgctaaagataattgggtgaccaatttgattagaactacaattcaaattcttagttcattaccatcaattgtagttggcttattgggttatttattgtttgtagttcaatttggctttggtttttcaattatttctggtgctttagctttgaccttttttaatttgccaattttaactagcaatattgaagaagcaatcaagggcgtcccacaagatcaacgtgaagcaggattggctttaggattatctaattggaaaactattcgcgggattgttttacccgctgctcttcccggaattttaactggaattattttgagtgcgggccgaatcttcggggaagctgccgctttgatctatacagcgggacaaagtggatcaacagtcaattatgcggactggaatccatttagtccaactagtccacttaatgtaatgcggccagccgaaacattggcggtccacatttggaaagtaaatactgaaggaattattcctgatgccacgattgtttcagcagctacttcagcgctcttggttattgtggtaatcgtatttaatttaggtgcacgttatttaggcaataaattgtaccgcaagttaactgcagctaagtaggtgaaataatgcaagatttaaaacctagctatattaaaacttttgcaaatgatgatttggaattatcaactgaagatttaagtgttctttatggcggtaaggtacaaaaattatttgatgccagtcttcaatttaaaaagaacacgattacagctttgatcggtgcttcgggttcaggtaaatcaacatttttacgttcattaaatcgaatgaatgatcgagtagcaactgttaacggaaaaatctggtttcatggtttagatgtgaataagcctaatatcaatgtttatgaattaagaaaaaacattggcatggtttttcagcggcctaatccatttcctaaatcaattagagaaaatattgtttatgctttgaaggcagatggacataaggatcgggcagaacttgatcgagttgtagaagaaagtttgcgtgcggctgctttatgggatgaagttaaagataagctggataaaagtgcattagcattgtcgggtggtcaacaacagcgtttatgcattgctcgtgctttagctgttaagccagaaattttactactggacgaacctgccagcgctttggatcctgtttctacttctaaactggaagatacccttaagcagttgaggagtaagtatactatgattatggtaactcacaacatgcagcaagcctcaagaattagtgattatactgcattcttccatttaggacatgcaattgaatataattcaacggcagagatctttactaatcctaagggtaagattactgaaaactatattcagggaagttttggataaaatgacaacaataatttcagcaaaagatgtacatctaagttatggcaattatgaagcactgcacgggatcagtcttgattttaagaaaaaagaattaacagctttgatcggtccaagtggttgtggtaaatctacttttttacgctgtcttaatcgaatgaacgatgacatcgaaaacattaatatcacaggtgaaatcaagtttgaaggccaagatatctataattctaaaatggatttggtcagtctacgtaaagaagtcggcatggtttttcaacagccaaccccattcccgttttccgtatatgacaatgtggcttatggcttaaaaattgctggtgttaaagacaaagagctaattgatcagcgggtagaagagagtcttaagcaagctgctatttggaaagaaacaaaggacaatttaactagaaacgctcaagcattttcaggaggacagcagcaaagaatttgtattgctcgtgcgttggctgttagacctaaagttgttttattagatgagcccacaagtgcgcttgacccaatttcaagtagtgagattgaagagacactgatggaactaaagcatcagtatacttttattatggtgactcacaatttgcagcaagcaggacgaatttctgatcagaccgcctttttgatgaatggcgatttgattgaagctggtccaactgaagaaatgtttattgcacctaagaaacaaatcacaagtgattatcttaacggtcgttttggttaaaattttgaggtaaaaagatgcacgaaatatttttggatgaactgaaaaaattaaatacacaatttatggaaatgggtgtcctcgtcaacgatgatattgaccatgctacccgtgcttttgttgatcatgataaaaagactgcgcagtcaatggttgatgatgaagaaaagattcctacagaatcaattaatattcaaaagcaagccttaaaattaatggccttgcagcaaccggtagctactgattttagagttgttatcagtattttaaaggccactactgacttggagcgaattggtgaaaatgctatgagtattgctctggaaacaatcagagtaaaaggtaatcctcgtattccagaagttgaagaaattatttctaatatgacacataatgtgcgacatatgttaattcaagttttaactgcttacgtgcaagatgatgaaaaaatggcacgtgaagtggctagtcgtgatagcatgattgaccacgactatgtaagagctcgtcaattgatcgttgatggaattgaagatgatccttcgcgtgcaatggcttcatcaagctattttgtagttacccgtttacttgaacgaatcggtgaccacattgttaacttggctagctgggtggtttataaaactacgggtgaactagaagaactatctaattcaactgaaagtgaaacgatttaaataaagtaccgtaaaaagcggtgctttttttgtaataaaaaacagttgatacgcgtggtgctagttaaatcgttctagacaatatgccatattataagctaaaatagctatttctagccgctgttgaaagcctactggacttcttgctcgattattctcagcgttgtaataactaagcaaagaaaagtcgctttcaatgctttttctaattgccatcatcgcttactattgcgtggaccttgaagccataataatagactttcttggttgctttataaccaatatcagctacgccccgaaagatcttgacacgataattgcaaacaggctggcaaactggcactgggaaactatcaataatcaaaaattctccagctgtctttacttcttgattccaagcctgacggatacaacgaattagaggcaagagcattcgagctcgacggttaaaacgagaatgagataagccaacgaagaatttacagaatcttcgttgagattcaattccaatttcagtttgccaaatgagcatcgctaagatagaactatcaggaagcttggtctgatcaacatttttacgatgtttaagtccatcaggcgcataaagcttatatagcgagcgacaaatcacatttaaccgattaaaactaacttgtaaatggtgagaaaaacgcttaagcttgagatagttcaattagatcagactcttttctatttaaattacctacaacttttattaactaaaacgatttaactagcaccacgcgtataattaatgaatatttcaaaaactgtattggcgttataccaaacaattattggtgaaaaacagaaacgcttaatcaagacagtagatgcttatttggacattaactacggtgataaagtttatcagataattgatcaagttaaggaacgtaatattccaattttgtcttttggggatatagcagatcaaaacaatacttactcaaactacactgtttttggcaatgatcaagttgacgagatggtggataaaattaatgaaatcatcaataaccaaaataaataaaattatcttttgcattttacagcaaagcttgctataataattaactgtaaattctacctaagactcgggtggcatgacgcctcaaaatcccgccgaggccagaagatgatgaagatttttatgctccatgtctttcggcatggagtttttgcttttttaaggccttatagaatttatcaatgtgatcatggaggtgaaataatttgagtaaagctgctattgctgaaaaagaaaagttcgttgatgcatttgctgaagaacttaaagctgctaaggcaatcttggtaattaactaccttggtttgactgttgaagaagttactaacatgcgtaaggaacttcgtgataacgatgttaagatgaaggttatcaagaacacctacttaagacgtgctgctgctaaggctggtatcgaaggtcttgatgatacttttgttggaccaactgctgttatctacactgataacgctgatgacgttactgaacctgcacgtatcgtttctaagtacgaagatgactttgacgttatcgaaattaagggtggtatgcttgaaggtaagttgacttctaaggatgaaatcaaggaacttgctgctatcccaggccgcgaaggtttgctttcaatgcttgtttctgtattacaagctcctgtacgcgactttgcatatgctgttaaggctgttgctgaatctaaggatgaagactcagctgaataataaagaaatttatatttaatatctaaattctaatttttcggaggatacttaaatggctttagatactgataagattattgaagaattgaagggtgctaccatccttgaattgaacgaccttgtaaaggctattgaagacgaatttgacgttactgctgctgctccagttgctgctgcaggtgctgcagacgcaggtgctgctaagtcagaattcgacgttgaattgactgaagcaggtcaagaaaaggttaaggttattaaggcagttcgtgacattactggtcttggccttaaggactcaaaggaccttgttgatggtgctcctaagaacgttaaggaaggcgtttcagaagacgaagctaacgacatcaaggctaagcttgaagaagttggtgctactgtaacccttaaatagttacagcccaactgggcaactatgaataagctctttgctatgtgcgaagagcttatttttttgtataattaaatttatgatgaaagatatagaaagaagactaacgccatatcaatgggtaatggccattttagctattatttcgatttttttgattattttagattttgctgcggttattaatattgatgaaccgactagtaaatggttctggatcaatagtgcaattgtagtatattttgcaattgattattttcgtggcttacatgcagcagaagacaagaaactatatttcaaaactcacatttatgacttgctgagtattattccaatggggttattgtttatcagcttaaatatttttaatttatctgggctggtatcagatttgcggcatttgcgtttgattcgattagctggtttgatgggaaaattacgtaatatttttcatactaatggcctactctatgtaatcttttttacaattacatttttgttggtaggagcggaagcattcgcaatcactgaacatgtaacgctggatactgctttttggtgggtcatttcaacagcttctactgtcggttatgatgcaatttttggcaaaacaattccaccgcatagtattgtaggaaaattcgttacattagtaatgatgcttttaggaattggaatagttggtatgttaacgtcatcgattacttcgtatttgatgaggagaacgaatggcgcgaatacgttaaaaacgcatgataatattcaattaattttgaaaaagcttgataatttagaaaagcaaaacaaggatttggctgatcaaaacaaaaagatgcaagcacagattaatgaattgaaagatgtacagaatacaacggagctgcataagataaaagaatggtttgagaaaaagaaaggttagttaaaatgagtgaagaaaaaaatcaaatgtattttgcgactgatcctactgccaagcatgatcaacatgttgttgattatcatgtggataatattgatttgaaattcacaacagacgcaggtgtcttttctaaaatgagggttgattatggctcaggcgtattgatcaaggcaatgaaagatgttgtttttcctaaggataatatcttggatgttggtaccggttatggtccgattggtttatttgcggctaagttttggcctgatcaaactgtagatatggttgatgtaaatgagcgtggattaagcttggcaaagcagaatgcacaagttaatcacatagataatgtaaatatctattcctctgattgttatgaacatgtggataatgataaaaagtttggtctaatattaacaaatccgcctattagagcaggaaaaaaagtggttaatgagattttactgggagcaaatgagcatttggttaatggcggtatcttattagtagttattcagaaaaagcagggagaacctagtgcgcgtaagctgatgaccaatacatatggtaattgtgaaattttaacaagagataaaggctattatatcttaaaatcaactaagaaataactaaataaaaaatgcttgaaagtactattaaataagcattagactttataaaagtgctttcaaaactggatttatcctcgtataataatcttgtaaatatcaagagtatgtgaagaggataattattatgaaaaaggcttggaaatacattgttgcagtattgattgtaattgttggtgtgtttatgttaggtatgatttccggtgataacgagactgctgctccagctggaattgctgcattatacttgatcttgtcaggaatctttttctaccacaactttagaaatcgtaacattgaaccattgtaaaaagtaagcagctagtcgcaaatagctgcttttttgatacaataaataaaaacgatgaattgagaagtgataaaatgctgtctggcgaagataaaaggaaatacatgcaattagccattgaccaggcaaaagaagctgaaaagcaaggagaggtgccgataggggcagttgttgttgatcctgatggccgcgtagttggtactggatataacaggcgtgaacttgatgaagatgctacccaacatgcagaaatgattgcgattaaagaagcttgcagtaagttaggcatgtggcgcttaattgactgcagcttattcgtgactttggaaccatgcccgatgtgtgcaggggcaattattaattctagaataaaagacgtttatttcggtgcacttgatccaaaagccggagcttgtggatcagttgtggatttatttagcgtagaaaaatttaatcatcatccgcatgcaattcgtggactgtatcgtgatcaatgtgcacaaatgctaaaagattttttcagagcgattcgtgagaaacaaaaagcagctaaattagctcaaaaagaagtataaaatcagtaatttttaaaacaagatgctggtaatatttactgaaatacgttaacatagttgttgggcaatgtttgacctctgaattgtgtcaggaccggaaggtagcagcactaaggttgttcaggcatgtgccttttttgttagaatattaacagctcttagctcttcgagagctaggagcttttttacttaggaaagagaatttatggcttatcaagcgctatatcgtaagtggcggccgcggacttttgacagtgtgattggtcaagaagcgattaccgataccttaaaaaatgcgattaaacgtggtaaggtttcccatgcgtttcttttcgcaggaccccgcggaactggtaaaacatcttgtgctaagatttttgctaaggcattgaattgtactaatttacaagatggtgaaccatgcaatgagtgtgctaactgtattgcagctgatcaaggttcaatgccagatatcatggaaattgatgccgcttcaaataatggggttgatgaaattcgtgaaattcgcgataaggtaaaatatgctccaacggaaggtaaatacaaggtatatatcatcgacgaagttcatatgttgtcgatgggagcttttaatgctttgctgaagacattagaagagccaccagagcatgtagtatttattttagcaacgactgaattgcaaaaagtgcctgcgacgattatttctagaacgcagcgctataattttaagcgaatttccaaagaagaccttgagaagagaatgaaatacattcttgatcaagaaaatattaaatatgaagataaagctttagcagtcattgctcaagtagccgatggtgggatgcgggatgctcttagcattttggatcaactgttgagttacgagaaggaaagtgtcaactatgatgatgctttgcagattacaggctttgcagatcgagaaaatattgaaaaaattcttttagctttgttaaatcaggatgcaggtcaagccttgcagcttacacaagatgagttggctaaaggagctagttcaaaaaacattttagatgaaatcatcgatctaactactaagagtttattaatcgtcaaaaccgatgaaaataaacaggaaacttttttaacaaaagactttattgaaaaaataaagagcgtttctacagatagttattatcgattgattaatttggctaataatgccttgaatgatttacgctatactaatcagcaacagataccactggaagtgttcttagtagaagcaagtagtcctgcaccagtgcagacaagcgttgccccagctaagacagcaccagctcaacctgcacaaggtaatactgatttgcaggctgaactagcagcgctgaagaagcaagtcgttgatttaacacaaaaacttagtgaagtatccaataagccaagtttatcaacaaatcaggtatttcacttggatactgcggtacctaaagtggctcctaagcctgctgttaaaccaaaagagaagcaaactaaaaagccggttagaaaagtcaaaaaaactacggcagaaaatcgcaaacaagtatatcatgttcttgaaaatgctactcgaaacgatttagagacaattaagaatgtctggcctgatttacaatctgttttagctgtctctgaaaaagcactgcttgatgtattagaaccagtggctgctagtcctgaacaagttgttatgaaatgcaaatatactttatggtttgaaaatgcgagcgcagataatgatctgttagggcgcttaacggactatattgaaaagtttgctaaacattcttacggcattgtcttggtgccagataacgattggctggcagttagaaaagaatttgttgaaagccataaggatgagctacttgctaagaaaaagcaacagattgagattcaagaagaaaagtcagatgaaccagaagttgatccagaagtgattaataaggcaaaggatctttttggggatgcagtcaatattaaagactaaagtactatgagcaatgattataatattaaagttttaaataaagaaacaacattacagatcttactagaagatcataattctttgattcgttttggagatggagaattagatttaattagaggagcaagtattccgtatcaagattatcaaccggaattagctggttcgctaaaagagctcctgttagaaggcagcaatcgccgtttattagtaggattatctgatgtttttgaaaagttagatcgctatagtgattattgccgtaatttttatcaaaatagtttcttcccgaataatcatgacttgttaagagaagttgaattgcaatacaatgtatacgtttctactttcttttcacggccatatattgatttagtagataaaagtcacgctaaagattattttgctaaaatgaaacagctttggcaggatcgtgatcttttaattgtagaaggtaaatatagtcgctcaggcgaaggcaatgacttgttttctaatgctagatcaattagtagactcatttgtccgccaactaatgcatatagtcgcaaaaaagttattgaagatgaaattattaaaaatgcagctaataggttgattttactgatgttaggtcctactgcaaaagtgattgtggctgatttgatagctcagcttaataatcaaatgattgatatagggcacatcgattcagaatatgaatggatgaaaatgggcgtaactaataaggtgaagataccgcataagcatactgctgagtttaattttgatgataaacaagttaaactagagaaagacgacaattttgataagcagattattagtataatagaataataaaggagaaaaattatgagtagaagacctaattttggtggtatgggcatgggcggcatgaacatgcaacaaatgatgaagcaagctaagaagttgcaagcacaaatggcagaagagcaggaaaacattactgctcaagaatttactggtaagtctgccgatgatttagtagtagctacctttactggtgaccgcaagttgaaggacatcaagattgataaggaagcaattgatccagacgacccagatatgttacaagatttggtaattgatgcggttaacaagggcttgaccaaaattgatgaggcaactcaggcaagcttaggtaaatacacgaaaggtttgatgtaattgcaatatccattaccaattgctcatttaattgatgcttatatgaagctacctggaatcggtgaaaaaacggcgactcggttggctttttatacgatggatatgcctgatcaggatgtcgatgattttgctaagtctttagttcaagtaaaaaaagacattcatcaatgtccgatctgtggcaatattaccgaaaaagatgtctgtgatatttgctctaatcctaatcgcgatcaaacaactattatggtagttgaacaaccaaaggatttgatggcttttgaggaaatgggcgaatatgacggactttatcacgtgcttcatggtgttctttcaccaatggatggaattggaccagaagagatcaatatcaagtctttaattacgcgtttgcaaaaaaatgatgctgttaaagaagtgattttggcgcttaattcaactccagaaggcgaatcaactgcgatgtatatcagcaaattaattaagccagctggtattaaggtaaccagattggccgctggtttgtcagttggtagtgacattgaatatgctaattccattactttaaagcgcgcagtgcaaggaagaacggcattataatggctaataaaaagcaagcaaagatcaaagcaatgggtgatcaaaagttggtagccgagattgaaaagctacaaaatcaaattgcattagagcaagatctcgatcaaacaactttagatttatccgaagataattatgtgcaaaatcgaatcttaaaggcaaagtatacttttttgtataatgaagctcgtcatcgaggcacaagatttagtggtattactaatgctattacccagtagaaaaagaccgaatattggtctttttttattttgaataaataaaaaatagtaggactgttaatctctatgaaacttctgtagaatagacatatggaggattttatgagaggttattttgttagttttgaaggccctgatggcgccgggaaaagtacagttttaaaagaagtattgaaccaaattggttcagagcttaagacacaatatcttgtgacgcgtgaaccaggcggttcaaaaattgcagaaaaaattcgcgacattattttagatcctgctaacgacaagatggacaataagaccgaagcgcttttatatgctgcatcacgtagtcagcatgtggaggagattattcgtccagctttaaaggaaggcaaagtcgtattttcagatcgctatgtcgatagttctttagcttatcaaggagcgggacgtgatttaggaattcaggaagttaagcaaattaatgattttgcaacggataaattagatcctgatcttacttttttcttagatcttgatcctgaagtagggttaaaacgaattgaaaagctgcgtccgggtcaggaagatcgtttggaacaagagaatcttgcctttcataaaaaggtttatgccggttttctcaaggtaaaagagacgtatcctgaacgcttcgtaactgttgatgctacgcagccaattgatcaggtagttgctcaagttattgcaacattaaagcaaagaatgccagagttattttaaggattgatttagatgaagttagtaattgcaattgtgcaaaaagaagactctaatgatttacaacgggcctttgttcaaaatgattttcgtgctactaagttagcaacttcaggtggttttttaagtcaaggaaatactacctttttagtaggttgtgatgacgataaagtagacgatgtattaaagattattaaggaacagtcccgagcaagagaggaaattgcaacaccacatatggtttcaactgggtatgaaattacacagcctttgaaagtgacagtcggtggtgcaacttgttttgttgttccagttgatgagtttaaacgcttctgatgattgatcttagtaatgttgggaaaaagcaaacccaatttttaaaaagagcatatgaccaaaaaaagttagctcatagttatctttttgttgatagcgatgaggcacgggcattgaatactgcatactggctagcttgtttgtttaattgtactggtgaaaataagccggatggcagctgtcaaaattgtcggcaaattttgtcaggtaaccacccagatgtattgctagtagcgcctgatggaaaacaggctctagggattgatcaaattcgtcccttaaaagaagaattagccaaaagcccagttgaaagtactcgccgtttcttctttattaatgaagcacaaaagttaactttagctgcagcaaacggtttattaaacttactagaagaaccagtagcgccagtagttacgattttgattactaacaatagtgatcagattttaccaacggtgcgttcacggacccagatcattaattttgacaatggtgagagggctagtggtaggactgcagtcttactggagaatggtttttcaaaagcagagattgaggaactgggtaatcttgataaatggaatcaggcaattaaatatttttatcaagaaatgctggaacacaacagcttagcacttgtcagtgcacataagctagctgctgatgctaagctagtgtcagagcagggttacatcttgcttcagttaaaattattggccgagcaagatttgcgtaatcctgctaaaagaataatggcggcgacaatgcttaagaatttaattgaaatagacaaaatgcgtttgagtaacgtaaatttacaaaatgcgttagattatctcgccttaaaatggaagtaggtgtttagattggatccatattcaaaactgaaaaagattgaagaaacaacagaaaatatgaccaagacgattgccagcttggaaaatgatattttagaaacattaaaagaaaacacggagttgaaggtagaaaatcaattactccatgagaagctggacaagttaacggcaaatcagcctgcacctgagactaaaacgcagagtggcttggaatcattgaagaagatttatgattcagggtaccacatttgcaatatgtactatggctcgcatcgtgatccaagtgcagattgtatgttttgtcttgatattttggacaattttggcgaaaaaaagggcaagaaaaaggacggtagataatgaaacgtcaaagcagttatgcaaaagatgaaggaaagctttatttagtgccaactccgattggtaacttggaagatattactattcgcgctaaaaaagttttaaccgatgcagattatgtagccgcagaagatacaagaactagtgggattttactggaaaaaattggggttcataataaaatgatctcttttcataagtataattccaaggagcgggcgccggaattgatcaagttgatgaaggaaggtgctgtgattgccgagattagtgacgcggggatgcccgtgatttctgacccaggttatgtattagtacaagaatgcattaagcatgatattccggttgtaccacttcctggtccaaatgctttttcaactgctttgattgcttccggttttaatcagccatttacttattatggctttttaccaagaaaatcatcggaacagaagacctattttgcacagatgcgcgataatagagcaacatcaattttttatgaagccccgcatcgtctagcaaaaaacctcaaaacattggctagtgtgctgccaaaagatcgtcaaattgtagctgcacgtgaactgaccaaaatccacgaagagtttatccggggtagtgtggaagaagttacgaattacttcaatgagaatgctccacgcggggaatttgtgattctagtttcacctaatacagaagcgcctcagcaactatcttggacagaattaattgacttagttaatgacttggttgaaaaaggtgaatccaagaaagatgcaattaaacaggtagccaagcagcatcatgtttctaagaatgaattgtatgatcaatatcaccaggattaattatgaagtataccgaagaatatcaaattgaatttaaagattgtgacgaaaatcggcgtttaaaattaccagcactagttgagttaatgatgcaggtttctgagcatcaattaagtcaaggtggtgctgggactgatgacttggttaagcgtggtctaggctgggtcgttactcaatatcattttgagattaaagacctgcctaaaccgggtgatcaagttattctaagtactgaagctagcggctataatcgtttttttgagtatcgtgattttggcgttagtacgcaagacggtaagccattagtgactgtaaaaagccagtgggtaatgctcgacttgaagaagcggcatatggtgccaaccgatactaaaatgatggaagattggggtgcaccactacttaaaaagatgccacgttttccaagattgcgtccgcaaaccgaatacgagcaaaagcgttcataccgtgcgcgttacgatgacttagatactaatcatcatgtaactaatagtcattatttcagttggtttgttgatatgttggatcgtaactttttaaaagaacatattgttacagcaattgatattaaatttgataaagaagttcattatggtgagagtataaattcttgcatggacttggttcaatatgatattattattacatctcatgcaattgaagcagaagatgggacagttaaggccgtctgtgaattaagttggcgtgagatatagtaacaacatgacgctattagttgtttttatttaggggaggaatcggtcaaatgaatacaaagaaaattttacgaacggatttacagcaactagtctttttaggtattgttgttgcaatgaaaattattctaagtcagttttcttttggtccagtaatggttaaagtgggactgggtttcattgggagtgtgctattaggatatctctttggtccgctctggggaacaattggcggtggaattagtgatttaatttcatctgcactttttggcgatcaaggtggctttttcattggttttactttaacagcaatggcaggcccatttatctacgccctgtttttatataataagccagttaaaatttggcggattattgcttctactattctggtgactgtaattgtcaatattggcatgaataccttatggctacatattatgtatggtatcaatttcaatgcggctttgatccaacgtttacctaaggagatgatcgttccttggattcaaatggttatcagctactttgttttacaagccgtttctcgtgttaaaataaaaaagtgatttaaagcgaaaagagaaaaatgtataaaatgaaaattttaagtgtttcgacagctactaatcatttgagcgtggccttgaatgatggtcaacaaattattgttgagaaaaatgaacgagatgagcgtaatcatagcgaacatcttgatccttggattgatgaaatcttaaaagataatgatttaagcttaaaagatattgatcgttttgcagttgctattgggccaggttcttatactggactaagaattggaatcactactgttaagatgtttgccagcattttagataaagaggttgtaggaatctcaactttacaagctttggctaaaggcgttcaagaagacgctttggtaattactggtttagatgcaagaaatgacaattattttgcggccggttatttaagcggtgctgtaccagagaatgtcattccagacggtcattacaatatcgacgttttaattaaggcgattcaagattatgcggccaagcatgaagttaagaaaattgtttttgtgggctcaggtcttgaaaagcaagatgaaaaatttaaagctttgaatattccatatgtttatggaactgaagaagagaatgtcatccatgctgggctaattggacaattagctgaaaatgcggttccagttgatccagataaattattgccacgttacttgcgtcgaactcaggctgaagtagactggcataaaaagacaggcaaaccattcgagccagatagtcattatgttgaagaagtttaatcaatttttccatcaacagttaaatcggattgatatgagttttaccccgtttattgcgaatgtaaacggtaagagactacaaattatgcaagctacagatgacaatattcctgacctgcttgtattagaggagcaagtttattcaggtcggacaccgtggaataagttttcatttgagcgagaactagagaagcggcataattgtctttatttggtagtgtattatgaatcgatgctagttgcatttattggtgcgcgttttactccagaagagacgcatattactaatattgcagtagcgccggcttttcaaaatatgcatattggtcgttacttaatgcaattgattattgatcgggcgcgtgaaaatgacagtgattgcgttagtctagaggtaagagtagataatgagattgcccaaaagctatatcgttccttaggttttgaaggtaccttcattcgtaaaaactattaccatgatactcataccgatgctatgaacatggttttatggttaaaaccacatcagattaaaagaaagaagtttacgttttgagtgaaaaaaagtgttcgcattttagcttatgagagttcttgtgatgaaacttccactgctgtcattaaaaatgggcgtgagattgaaagcttaatcgtagcaacgcagattaagagtcatcaacgctttggtggtgtagtccctgaagttgctagtcgtcatcatattgaagtggttagtcagattactaaagaagctttggctgaagctaattgtacttggaaagatatcgatgcaattgctgtgacttatggccctggcttagttggtgctcttttaattggtgtaagtgcagctaaggctgcttcaatggcaacgggtattcctttgattggtgttgatcatattatggggcacattatggcagctcaactaaaagatgagattgaatatccagctcttgcattacaggtttcaggtggacatactgaaatagttttacttaaggatcctgttcattttgaaattatcggtgatacgcgcgatgatgctactggcgaagcatacgataagattggtcgtgttcttggggtaaactatccagcaggtaaaactatcgatgcctgggctcatgaaggcaaggatacctttaacttcccacgagcaatgatggaagatgatgactatgacttctcattctcaggtttaaagtcagcttttattaatacttgtcatcatgctgatcagattcatgaaaagttgaataagtatgatctggctgcaagttttcaagcagcagtaattgatgttttggctcataaaacaattcgcgcaattaagcaatataagcccaagacctttatcatgggtggtggagttgctgctaaccatggcttacgtgatcgcatgagtgcagaaattgcaaaactacctaaggcagatcaaccaaaggtgattttaccagatatcaagctttgtggtgataacgctgcgatgattggtgctgctgcatataatctttataatgataatcaatttgcggatttgactttgaatgctgatccatcattggaattgccatatgctaagagcatgttgaattaaatagaataactttttaaatcaaatacctagaacgattatttctaggtatttttttctactaaggcatggtccttaggatcttttaaatctaaggcgattgattcgtaagcgtcaaataaaatagtgtacttaaaaaccgtcccagttactgttatactgagacggttatttaagttcttttatttacaatttatctggatcttctcttgccacggtaaataagcttcaagggtttccgaatccagaatctcttcattcggtaatttctgaagcaaataattcaagtacttttcaggatcaaggccatttctcttggcagtttcaattaagcttagaataaagccacttgcagtagcaccctcaaaactttgagaaaataaccaattcttccggcccatgacgagtgattttacagcgcgttcagccttattgttagataattctaaattgccatcaagcaagacatgctcaaaagtagcttgatgcttgagggtataattaatggctcttcccaatttagagcctggcaaaacggtgattttatttttctcacaccagttgaagaactcttgcatcagaggcttgagctttgcttgtcttagctggtaacgttcttgtttgctcaaattctcccaggtttgttctaagtaaaacatgcgattgcagtagttgagtcctttttgggcaagggacttttcagaagcctgttgtggtacggcttcgtgaaactttcttctaacatgagcccagcagccaactaaagttgctttcggcaattgctcataagcctgccacatatcacagtgcaaataaccgggatagtttcctaaaaaagtttaaggcaaccttgcaactccgggaaggatcatgatgatagagtgtaatcccgtattgatcatgtttgcctgaaaggaagacccaatagtaagtcttgattgttttactttctaagactgtataataagtttcatcggcatgtaaaattggccgcattaacagcttttgcttaagcagatcatacactggtttaaagtagtattgactgcttttcaaatcccaataatttaacatctgtcttgaaacttctagtcccatcttcttccagtcgctttcttgacgatagtccggcaccttcatttcatatttttgataaagtgaatgagcgatgagtgaagctgaacctagaccatggtttaggggagctttaggtactgcagctttaatgatcttgtcgctaagatttctttgactgcaatatttacatttgtaagcatgttggatatggtctaaccttttaagttgagctgggataaacaataattcttggcgaactgactgcttgcctatctcaatcagttcatgatgacaatcaggacaatgcttgtcgcctaattcatggtgaacctcttcagctggaagggcagctagtaagtcagcacgctttcgtttgtgagcttgtcttttataagtaatagtctgaacggcggcgtcggggacgttctccgtcatcttgagcatcaggttcatcaaagagacttgtttgtccatttaaaggcatttgttctgaagatttgccataacgtttttgcgttaagtaagctacttgttcacggaggagcttaatttcatcagttaagttttgaatagtagttgcttgttgtgcaataatcttttccaaattttcttgtgacatgagttaaacttcctcctaaatttattagttaaaagaatatcaaaaaagcgtgcgatgtcaagtgttagtagaattcgcacgctttcgtgttctttatttttggattgattgcgaagcccttcattagccagtcgacctgctcagaagataaagcttgaacttcattttgattcctgggccagttcaattttccattttcaaatcttttgtagagcagccaaaaaccttgtccgtcccaataaagggctttgaagcggtccttgcttccgccgcaaaagaggaagactttgccgctaaaaggatcaagttcaaactgttctttgactaaagttgctagtccatcaatgcctttacgcagatccgtcttgccgcaaacgatatagacttgccctaagtcactgagcttaatcatggcaagactttctcaagcagcttattcataatttcagggtctaagctgctgtaaaaattcagctctaagtcattcttctttaaactaagcaacagattattgcgtggtggacgagccttcttaggtttagaagaacggccaagtgccacaatgggttgttgtttttcgatcatattcttaacctccattaaattgatgagattagaatacctgaaaaatacggactaaaaaagatactcggttatatgacgcttacattgattccttgcctgcgttacaaattctaaagtattcgctagaaccatctgcgatatatggccccatgtgacgcgtgtcatcgcctgtttttctttcgatatgaattacccgggcaccactatctgcgagcattctggtacaagtagggcctgagaggacgtgggtaaagtcaataacgagcatcccgcttaaaggataaggtttgtttttatctaaatgactgttttttgcttctagctcagcataattaggttctgtcatagttgtgcgctttctattttaaaaagaaaaagctgttcgaagtgaacagctttttgatgagaataaattaattattcacccttgataacttcagtacgtggattcttaggaccttgagccttagaaattacgccttcttcagtcaatttttcgatttgatctggatcataaccaagtgaagctaaaatttccttgttgttttcaccaagatctggagcacgcttgtagttagaaagtgagaatggcaaaccaatagtcttgaacttaccacggttaccaccttggtcgatggttacgatagtaccatccttgttcaagtccgggccattttcaatttcgtgccagtcaagaactggacctacaggaataccagcagcaccaagcttcttagttaattcatacttgtcgtattgcttagtgtagctttcaattaatgggtaaatttcttccttgtgtaattgacggttgtgccagccatcaaagcgaggattagtttcccaacctttagccttgtaagtccgaccaataacttggccaccttcagtgttctcagcacgaggaattgccttgccccatttccagttagggtaaacagcgtagtgaggaagggcacctaagttgtctaacatgatttggttacgcaacttgatacggcagaggttcaatacagcgtcttgcattgactggtaaacaaaaataccttcactggtgtgttcacgttgaagaagggcagctaagataccaatagtaaggtgcatccctgggtttgagtcacctaaagtagcagctgattgagtaggaacgttggctttgccttcgttccaaccagtagcagaagcagcaccaccagcagattgagcaactggttcaaaggccttaacgttttcaaaacgtgaatcttcattgaagcccttcaatgatgcatagatcaatcttgggttcaaagcgtgaagcttttcccaaccaaaaccgttacgatcagctgaacctggtgcaatgttttcaacaaagacatcagccttcttagccaagtcgtacataatctttttaccttcatcagtcttgatgttcaaagtcaaagacttcttgttggcgttcaattgcaagtagtaaagactccatgaatcttgaatatcaagtaattcatttctagtagggtccccagtgttagtacgttcaatcttaataacttcagcaccaagccatgctaaaagttgagtacatgatggaccttattgaacttgtgtccagtcaacaactttaataccttttaaaggtgcatattcattttcttcagtcgtgattaattgtccttatcttcaagttgtgctaaatctaattctgggtttaagttaccaatgtgaccagattccttacccattgattcaggaatttgagcatcaataattgaaggattacctgattcgtaggccttttcaagagcatccttcatttcagcgtagttacttacacggtagctgtcaccaccaaaggccttagcgatttcagcatagtgagcattgtggcttaaaacagtaggtcctaattggtctttaactgggttacggtcaccattgtagataccaccattgttaatgatgacaacggtaacaggtaagtggtaacggcagataatttccatttccattccgtccaaaccaaaggctgagtcaccatgaagtgagatgactttcttaccagtttcaacagctgcagcaatggcataacctaggccgacacccattacgccccaagtaccagtatcaagacggtgacgaggcttttgcataccgattaagttacgaccaatgtccaaagtgttggcaccctcacttacgatgtaagtgtcagggtgcttttgcatcaagttattgataggttcaattgcactgtagaagcctaaagttggcttagcttcagaatcagcgattcttttagcaaatttttcattgttagcttcacaggcattcttaattgaatctagccagtcttgaggggccttaacgttagctttttcaaggggtgcgtttaatttttgtaaaacagaagtaatgtcaccttgtaatggggcatcgatctttctgtttgaatcaaattctgttgcgtcaatatcgacttgaacaaacttagcgtcttcattaaacaatggagcctcaccatttgaaagcatccaattaagccgagcaccgattaataagactacatcggcttgacctaaagtaaatgaacgagctgaagcagctgatgatggtgagtcatctggtacaacgcctttagccattgacatcggcaaaaatggaataccagtcttagtaactaattctctgacttctgcttcacttctagcataagctgagcccttacctaggataatagcagggtgtttagcgttctttaataattcaacagcacggtcaattgcatcatctgatggcaattgctttggagctggatcgactacttcatagatatgagcgtctgacttttgtgcaactgtgtcggcaactgttgcagcaggaaggtcaaggtaaacaccaccaggccgaccgctcatagcagttctaacggcacgagcaactgctaagcccatgtcttcagcacggtcaacacgataagctgctttacataaaggtttagcaacattgtattgatcaagtccttcatagtctccacggtcgaggtcgatgatatgacgatctgatgaacctgagatcataatcattgggaagcaattcttagtggcttctgctaaagcagttaaaccatttaagaaaccaggagcagaaactgttaaggctacaccaggcttgccggtaagaaaaccagcagcagcggctgcgtctacagctgcatcttctcttctaaattcataaaacttcataccctttaattcagctaaacgggcaaagtcagtaactggaatgccgacaccaccatgcatgttgtttaaaccgtttgcttgtaaagcatcgattaaaagtgcagcaccagtaagtgatacatcttgtgtcacgaaaaaaaattctttcaaaaaatccccaaatgcttatgtttatgcatttcaaaaccaagatacacctcttgaattgtatatacaggcacaattgaataataaggtacgttattttaatatgcgcatataaaaataagcaagtcctaatatattagaacttacttattatacttttattcaaaattgtccatttcttcgattgccttttcccaggcagaatttgcttcatctaatttctgttgtacatcagaaagctgttcttgcagtggccccaatttatcaaagcttgaagcaatttctggattggccatttcggtttggatttcttgctctcgttcttcaagctgttcaatttgtttttctgcattatcaattgcacgctgcaactttctcttttgagaatcacgttgcttttgctcttggtaagaaagtttttgctggctaatttgtttgcttggctcgacttctgtctcagcggcactattttcagccatagctgcttgttttgccttctcatcaagataataagaataattgccatcgtagactttagcatgcccatcgcgaactaaaacaatcttattagctagttgattgataaagtaacggtcgtgggaaacaaagagcagggtaccatcaaagtcttttaaagctttttctagtacttcttttgcttcgatatctaagtggttagttggttcatccatcagtaagaagttatcatgttcaagtgataaaacagttaaagttaaccgtgctttttgtccaccagatagttgacctacggtcttatcaatgtctttagctgtgaataaaaagctggctaagattgaccgtacatcgcgttcaggcatggtcttatgacgatccccaacagtatccaatacagttttagatggatctagtctttgtaattcttggtcgtaataaccaatctcaagggatgcgccatacttaattgagccactcttgggcgttaattgcttcataatagtcttaagcagggtagatttaccgattccatttggtccaatgatcgcgacgcgatctcctttattaatctggaaggaaatatctttaaccatggttttatcgggataaccaatcgtcaaatcgttgaaaattaatacttccttgccagaaggatgatcgcttgaaaaatgaatccgtaccttatttttatgtttaggtggagtaatccgctcaattttttctagttttttacgccgactttgtgcacgcttagtggtagttgctcgaaccaagtttttttggataaattcttcatcttttttgatttcagcttgttgcttttcataagcggcttcttggtccttatcacgttgctcgcgctgcatgacataggctgaatagttgcccttaaaagcagttaatttaccaaattctagttcaaaaatttgggctgctaaatgatctaagaaatattggtcgtgggaaaccacgaggattgcaccactgtaattctttaaaaatccttccaaccaatctagggtatctaaatctaagtagttagttggctcgtccaataacaacagagcaggtttgcgcaaaagcaacttaacaaaagctaaccgtgttttttcaccaccggataaactaccaatcttcttttgccaagtgtcttcaggaaacttaaagccattcaagatacttttaatatcagattgataagtataaccgcctttttgttcaaagttgaattgcttttgatcgtattgcttaagcaattcttgatcttcaggatgatctgcaattttttcttgtagttggactaagctttttctttcccttattaaaggagcgaaaacggtttccatttcatcccaaatggttttattttcatctaatgcattttcctgagcgatataaccaacatcaatgcctttattaactgtaaattcgccgtgagttggttcttgctcacctgtcattatttttaacagggtagtcttaccaaccccgttaggaccaactaagccgattctggcattggaatcgattgaaaaattaacatttttgaataatgtgttggccccaaattgttgttctaaatcgtgtccttgtgcaataatcataatttttcacctaaccactattctaccatatagcgcaaattgtttgtttttaagttaaatatgtgaaaaaatgatgatttgtgaaaaagatacttgcataagtactatcatagcaggtatgatagtagtgcttgattgtacattcacaaacatttaagtttggagggttcctatatggaaaaaataaaaatcccaaaagcaacggcaaaaagattaccattatattaccgttatttgattattttaaatgaagaaggcaaagataaggtttcttcaactgagctgtcagaggcagttcaagtagatagtgcttcaattagaagagacttttcatattttggtgcgttgggaaaacgtggctatggatatgatgtaaagaatttattgagcttcttcaagaaaattttgaatcaagatactttaactaatgttgctttaataggtgtaggtaatctgggacgggcgctgcttaattacaactttaagcgcagtaataatattcgaatttcctgtgcttttgatatcaataaggagattactggtcgtatcttaagtggtgtccctgtttatgacatggacgacttaaagcaacaactaagtgatcaacagattacaattgcaattttgacagttccttcaacagctgctcagaaaaccacagatgaaatggttgatgcgggtgtaaagggaattatgaactttactccgattcgtttatcagctccagctgatgtgcgagtacaaaatgtagacttagcaaccgaattgcaaacgttgatctatttcttagatagtgacaaagaaaactaaatttgagtaaaagaaacatactaacctagtgttggatcatgaatcgacggattcacgatctggcactttttattttgtctaaaatagaaagtgaagataaagcaaatcaagtcttcagctttttagacacttgatgtcgtaaaagaaacggactgctttaccacctattcttaagtctcttcgaagtctgtgggcacttagatgccgtgtttagaaaattagaattaataggttgataaagaggtttatcttcacagcggaggttatattatggaatcacaaattattttcggtattgatgttagcagtaaatcttccacagtttgtgtggttaatgaccggatcaaacaaggcgaatcttttagaatctctaatgattcctttggctatcaaaaactttatgagcaactgaaccaatatttgataactcctttagttgttttcgaagctactggtgtttattctctaagcctgcaagctttcttagaggattatcatattaagtatttgaagcttaatccgcttaaagcgaaaaagctaatggacaataatttacgccataataaaactgataaggtagatgcttatcgcctggctttaattcaatttaatgccccgcaaaagctgcgtgatccacagcccagagagtatcatgaacttcagaatgccagtcgctattatgaagaacttactaggagtatagttactactaaaaatcaattgcaccgcaacctccaatccactttcccacaaattgaagaaatactgtctcatccatctggcagaatttattgggcgcttgttagtcttttcccacatgctggatatgttctagaaaagaatgagacacaggtaactcaaatgcttaattctatttctggaataggacaacaaagggcacggtacttaaccacaagattatacgcttttgctagagaagcttatccttatgattccaaagatagtattatcgttagagctattcaaaggaacatttctaatttgttttcactccagcaagaacgcgactatgtaattaactacatggaaaagctggctaaagcagtaaacgctcgtgctttatccatctatttgagtatcccaggggttgctagaattacagcagtgagattagtagcagagctcggtgatctaagacggtttagcacttcagctcaaattgatgcgtttgttggcattgatccaggaaggtaccaatctggtgaaaaagacagttctcttggcattaccaagcatggcaatcatattgccagaaaaatactttatcgagttattactcaaatggagacggtaaaggctacgcagccttgccatataactgattattatgacaagaaaaaacgatcttcaaatagacaaggctataagaaaatcgccattgcatcagtccataaactgatacgcacaatgtttgctcttatcaaacatgatcaattatatgattacaacatagccaccgaaaataaaagactttagctgaaatcaaataatcaacttaagtataagcaacctatggaaaaactacaagtattcataggcttatttgtggtactttcgctttttcttaaatttaaactcttatttgctttaaccttattcgcatcattaaaacaagtaaatttattttcttaaatcattgataatacttgactttgggtagaaaaaagccgattttcggctttttttcatgcagttgtttcacttttgattaatttgacaggcaaaatataattcttttggcgcaatttttcgtcgggattggaaattcgggtaagcaataacttaaccaataaagttgcaatatcatgaattggctgagcaattgtggatagttccgaatggtaagtttgaatttgctttgttccgtcaaaaccaatcacttttaattccttaggcactttaatgcctaatttttttgcttcttgtaaaactaacactgcagttaaatcatctgtgcagacgacgccatcaggctgatcattgactaacatatcatgaattttcatatttttaatgttggaagaatcagaaaaagcaactgaacgaatgtgggctgaaaagtgacattcctttgcttcatcaagataagctgctagtcgttcgtcagtcggattaccttttctgtgttcattgcccagaaagtaaattttgtgacaaccagcttgaaccaagtcatgtactgccaacttgatgccttgataattatcacaactaacaattggaacattatcagatagctttcggtcgaaagagacaattggcaaacctagttgttggtattcattgatacctagattgtgcgcaccagcgatgatgccatcaacttgattagcctgaagcatgcgcagatattcgcgttctttttctttgttttgtcctgcattgcataggattactttatagttttgttggaataaagtggtttcgatatcctgtactaattccgcaaaaaaaggattagtgatctcaggaaaaatcaaaccgactaatttcattttctttccttgtaatgagcgggcaatagaattgggacgataatttaattcccgcattgcggcaaaaactttatctttagttttttgacttaaatagccatggttgttgattactcgcgaaacggtagttacagagcaaccggcttttttggcaacgtcgcttaattttgctgccatagtatcacctgatgtttaaagaattgtttgcatttgccaaagcttgccagtgtagtcaatgtcttgagcaaacgcaatttttttgttggtctgatcggcaaagtagcgtccagtcaataccttttcaccatcattaacgaatacttcaattaatgaatgatcaacaaagatatcaagcttgaggtcatgatttggtgaaagcgtaatagctcgactttcgccataatcaactgctactttttgcccagcatgagcacgatctaatactaatttaccatttttggtatcgaaattgagctgtaaactgttacttaagtcattatttgcagctaaatgtaaagtgccactttggttagccttaattgttaattcaagttcaaattgttggccggcttgatcgctgactacttgattagatatgcttgcttcgtttttgcggatactgcttattgccttaactggcgtttgaattaacttgtcactctttaggtggagttccttcacttgactcaagcagttagcccagttttcatcatcagtagggtaagtagtgtcaggcaagccaacccaactgacttcgtaggcattaccatctggggcgttaaaggcctgagtggcataaacatcgaacccgtgatccaaattgtgtaatttacctggattaattaacttatgattttcccagtcaatatcatcagcaataacgtacatatttgggtaaatgtcatcataagctgctacttttttgtctaaaccctgaggacagaaaatgaccacgactttgccatcaacacggacgatgttgggacactcgatcatgtagcccatgtcttcgttggtaaagtctaagaagcccaattcttcccagttctttagatcctgagacttccaaacgtcaatgtgaccgtgtttttcctttttatcttgggcacctaaaattgcgtagtaagtgtcattttctttgataatttggggatcgcgaaaatgttcggtgatgtgatctggattcttaaataggatggttttgtctgaaactttattatttttatccatccaagcaccgatttgataaggagtacgtacccaattttcatcgcggtggttaccggtatacatgatgaaaagcttaccatcgatttcgcgagcagagccagaataagctccatgtgaatcagccattgtgtctggttcaatacctaagcctaagttttcccagtgaaccatgtcagttgatttgaagtgccaccatgactttagaccgtgaactgcgccgaatggatatgattgatagaagaggtggtaagcaccatcaaagtaggaaaatccattagggtcattaattaagccagaaataggatgcaaatgatagcgcatttggtaaggggagtttgcggcttgtgcttgcaaatgcattaatgtatcagcgtcccaatcttgataaggtaagtaacgtttttctcttgtccattccataaatatacctccatgaaagcgttgtctttttacatgtattttaagttagtatgaaaaatatgtcaaacgtttaacagaaaaaataattattaattcataagtaataaaataaataaagaattttatgtcaaacgattgacatattttttgaatgcgttatcataattagtgaattgagaataaaacgtttacataggagggatcaatatggaccacagaaaagtggctgaacgagtaattaaagacgtcggccgtgacaatattattgccggtgcccactgtgctactcgtctgcgtttagtattaaaagatgattcaaaagtcgaccaaaaagcattggataatgatccagatgttaagggtacttttaaaaccaatggtcaatatcaagtaattattgggccaggagatgttaatgacgtttacgatgagttcattaaaatcactggtttgaaagaattatcaaccgatgatttgaagaaggttgctgcagaaggtaaaaagaagaatccagtaatggatttcattaaacttttgtctgacatctttgttccaatcattccagccttagttgctggtggtttgttgatggctttgaacaacttcttgacttcaccaggtctgtttggaccaaagtcagttgttcagatggtaccgaatgttgctggtatttcaagtatgattcaagttatgtcagcagctccgtttatttttatgccaattctagtcggaatgtcggcagctaaacggttcggtgctaaccaattcttgggtgctacaatcggaatgattatgacgacacctggactccttggtgcaaatcacttctgggacatttttggcttgcatgttgcgcaaactaactatcaataccaggttattccagttttagtagctgtttgggtattgtcaattttggaaaagtacttccacaagcacttgccatcagctgttgactttacctttacgccacttctttcaattatgattactggctttttgacttttacaattattgggccagtcttcaaaggcgtatcagatggtattaccaatgctatcgtttggctatatgacactactggtgcctttgggatgggtgtctttggtcttacctattcagctattgttactactgggcttcatcaaagttttccagcggttgaaactcagcttttagcagcctttgctaagaatccagccagctctggtgactttatctttgttaccgcatgtatggctaacgtagctcaaggtgccgcaactttcgctgtttacttcttaactaagaacaagaagatgaagggcttggctagttcatcaggtgtttcagcacttcttggtattactgaaccagcacttttcggtgttaacttgaagtataaattcccattcttctgtgccttaattggttcaggtgtagctgctgcttttgcgggcttgatgcatgttactgcagccgctcttggttcagctggtttcttaggcttcctttcaatttatcctaagactattccaatgtgggttgtttccgtattaattagttttgctgttgccttcatccttacttatgtttatggtaagggtcatttgaaggaagaagttgctgaacaagatgttccagtaaacgacgcaactgattatgctgaagaaactcaaaaggctgaaaagcttggtaaggaacaaatggcattaaaggatgaagttattgcttcaccagttgatggtactcctgagagtttaactaaagttaatgatcaagtattctctgctaagttaatgggtgatggtgcagccgttattccaagtgatggtacgatctattcaccagttactggtactgtgactattgcttatgaaactaagcatgcttatggcattaagtcagacgatggtgcagaagtattgattcacattggtcttgatactgtaaaccttaagggcgagcacttcgaaagtttcgttaagcaaggtcaaagagttaacaagggcgataagcttggtacagttgaccttgatgctgtgaaaaaggcaggctatgatactactgtcatggtagtaattactaacactgccaactatgcaaatgtttcaagaattactgatgcgggtgacaagcacggcgacaagttgattgctgttactgcacacaattagtttcttctactcctctagaaaaaattaaaacaattagaataaaagacgctaagaaagattgtttcttggcgttttttagtactaagtgttgcacttcaattttaagtttgagtaaaatgttctctataaagaaaaacaaagtgagggtatgttttatgaagttaaaaagtggagttattggagtattagtaactggattaactgtctttagcattaatctaactagctctaaaataaaggcagcgataacagtgcctaatcctaagacagattatgtagttaaaactacttctaatgtgtataagagtaatggtaagaggaccagttttaagacacgtggtcagatacaaaccggtaatgttccagtaattgaatcacaactatatgaaggcaagttcattaatgtgcaaggaactaagacgattaatggtactgcttattataagatcggtcctaacgcatacattaaacaaaataatgttttaaattatgctcaagaaaaagcaaagcttgaggcatatcaggcacaagatgatgtgaatgatgattcagatcagtcaacagaattaagctctgatgatgtgaattttgacatagcttggtatgacaacattaatgaggatccatctccagcgatgttcgatgattcaggatatcataatagagtgattaagaatgctcgtaaattattaggctatttcacttatggaacaggtgcataccgaactaattttggcagttggcgtcatcctaataaaaacggttcaactgattgttcaggatttgtgtggatcgtaatgaagagagcaggatatcgtgtaggaaatgctccattttttactctgccaatggaacgagatgctaaaagtactcatggctatttgaagaaaatttctgccaagaatattcgcccaggtgatattgtgattgttaatactggcaatggtgttggtcaaaacggacatgcagcaattgttgatggcaaatatgatggttgggacacgcaaattattgaagagggcggcaacttaggtgtagatgatgtgcaccgctctagtttaggtagctcactgagcgataagctggccaaaggtcgaatcacttatgctcgccccgttaaatagtatgctctatgctataattttgctaatcaataaaggataataagaatgaaaaagaacagcacgcttaaacatgtctggattatgacggctgtctattgggtagtaggtattctaagtattttctggggtaagcttgatcatacttttgcgtctcaattaaaagagatcaataatatttacgtgttagttttaataattatcttaagcttgccgctacttttatcgctgttattgtcggttaaagtaaaaatgccacgtttgatctgcaatccactagttgctgtaatttatctattagtggtaattgcagcaggtgtagcatataacttacaaaatattattggctacttcttcccaatcatcctcttcattattatggcgctagttgctgttttctatgctttggttaagacttttagcagcagaaaaagtggtaaatatttttttattgatggtaaagataagaaagaatgccatgatttctgggatgcttataagaagtactatgtaatgggattaacttacggcattattgatggtttgattactgtaattagttaaaaaagttaagaaaaatcaaaattagcactcaattgaaaaaagtgctaattttttcttgctttttttcacaaaacagtttattatcatatttgtaagttagcacttagcaaataagagtgctaatgattaatacagtaataaaaaatataatgaagaaaattaaacataagggggactaaacgtgttacaaccaattggtgatcgcgtgatcgttaaagttaagaaagaagaagaagaaactgttggtggcatcgttttagcatcaaatgctaagaagaagccaactgaaggcgaagttgtagctgttggtgaaggtgcttacgcatcaaacggtgaaaagattccaatggctgttaagaagggtgacgtagttctttacgataaatactcaggcactgacgttgaatacgaaggtgaaaagtacttagtccttcacgaaaaagacattttagctattgctaagtaatttagttaaaatttccaacgataattaagtaaattaaggagcatagataatctatggcaaaagatattaaattctcagaaaatgcaagacgttctcttttaaagggtgttaataagttagctgatactgttaagactactattggtcctaagggtagaaacgttgttttggaacaaagttacggcaaccctgacatcactaacgatggtgttaccattgcaaagtccatcgagttaaaggatcactacgaaaacatgggtgctaaacttgttgctgaagctgctcaaaagactaatgatattgctggtgacggtactactaccgcaactgttttgactcaagcaattactaatgaaggtatgaagaacgtaactgctggtgctaacccagttggcattcgtcgtggtattgaaaaagctactgaagctgctgttaatgaattgcacaagattagccacaaggttgaatcaagagaccaaattgctaacgtagctgcagtttcatcatcttcaaaggaagttggtaacttaatcgctgacgctatggaaaaggttggtcacgatggcgttatcactattgaagattcacgtggtatcaacactgaactttcagtagttgaaggtatgcaatttgatcgtggttacttatcacaatacatggtaactgacaacgataagatggaagcagatcttgataatccttacattttgatcactgacaagaagatctcaaacattcaagatatcttgccacttcttcaagaaattgttcaacaaggtaagtcattattgatcattgctgatgacgttactggtgaagctcttccaacacttgtattgaacaagattcgtggtaccttcaacgttgtagctgttaaggctcctggctttggtgaccgtcgtaaggctcagttacaagatattgctgctttgactggtggtactgtgattactgatgacttaggtcttgaattaagggacactaagattgatcaattaggtcaagctcgtcgtgtaactgtaaccaaggactcaactactattgttgacggtgctggttcaaaggatgctattcaagaacgtgaagattcaatcagaaagcaaattgaagaatcaacttcagactttgacaagaagaagcttcaagaacgtcttgctaagttaactggtggtgtagctgttatccacgtaggtgctgctactgaaaccgaattgaaggaacgtcgttacagaattgaagacgctttgaactcaactcgtgccgctgttgatgaaggttacgttgctggtggtggtactgctttagtagacgttgagaaggctatcaatgatcttaaggctgatactgcagatgaaaatactggtatccaaatcgtattaagagctttgtcagcaccagttcgtcaaattgctgaaaacgcaggtaagaatggtgaagttgttttgaaccacttactcaagcaagaaaacgaaattggctacaatgctgctactgatacttgggaaaacatggtagatgctggtatcattgacccaaccaaggtaaccagaaccgctttgcaaaatgctgcttcaattgccgctcttctgcttactactgaagctgttgttgcagaaattcctgaagaaaagccagctaacccagctccacaagctggtgcaccaggaatgggtatgtaattatatatcttaatgctttagcatttagatatataattcttgattacgaagtaatcaagttcatttacagtgctttagcactaaacttatgcacaaactctcactctagttcaaaaacaaatataattaaaatgacttcgaagttaaacaatcagttcagcttcgaagtttttctttttgtagcgtataatattgtacgtaactctatctaaaatacgaaataggaaagagacataaatgacggaaaaaacaactccaatgatggagcaatattacgaaattaaaaaacaatatcctgatgcctttcttttttatcgcgtcggagacttttacgaactgtttgaagatgacgcagttaaaggtgcacagattcttgaattgactttaacgcaccgatcaaatagaactaagaatccaattccaatggcaggtgtgcctcatatggctgtggatacttatgtaaatactttagttgaaaagggttataaagtagcactttgtgaacaacttgaggatcctaaaaaggccaaaggcatggttaaacggggaattattcaattagtgacgccgggaaccatgatgaatgaaggcccaaatgatgctaaagattcaaattacttaacatcagtaattaccactaagagtggctttggtttagcctacagtgatttatccactggtgaaatttatgctactcatttaaagagtttcgatgctgtttccaatgagctcttgtcacttcgtactcgtgaagttgtgtataacgggtcattatctgaacaaaataaagactttatgcacaaggccaacattacgatttctcgacctactccaattgaaggtgaacatgctgaaatttcttatgttgaacagaatttgactaatggggctgaaaaagaggctacccgtcagttagttggctatttgctttcaactcaaaagagaagtttagcgcacttgcagattgccaaaagctatgaagtaaatcaatatttgcagatgtcacatactgtgcagaataatttggaattggttgcttctgccaaaactggcaaaaaaatgggttcacttttctgggttttggataacacacacactgccatgggtggacgcttgcttaagcagtggctagctcgtccattattaaacatggatgaaattaaccatcgtgaagaaatggtgcaggccttgcttgatggctactttacacgagaaaatgcagttgatgccttaaagggtgtttacgacttggaacgtttaactggtcgaattgcttttggtaacgttaatgcgcgcgaattactacaattatcacgttctttgcaggccgttccagttattttagatgctttagagcaatcagattcagatatcttggtcgattttgctaaaaaaattgatccattaaagggcgttgccgaaatgattacttccactatcgtgaaggatccacctgtgttgactactgaaggtggcctgattcaaggtggggttgatccgcagcttgatcgctatcgggatgccatgaacaatggaaaaaaatggttggctgaaatggaagcagatgagcggcaaaagacaggtattgataacttaaaggtcggttataacaaggtctttggctattatattcaggtttctaacggtaacaagtctaaggtgccacttgatcgttatacgcgtaaacaaactttgactaacgctgagcgttatatcacaccggaactcaaggaacatgagaatctaattcttgaggcacagacacggtcaactgacttggaatatgatttatttgttaagctgcgtgaggacgttaagaagtatatccctgctttacaaaaattaggtgggcaactagcagcgctggatgtttattgtggttttgctacagtagctgaacaaaataattattgccggccaacttttcacgcagataatcaagatattaatgtgactaacggccgtcatccagttgtggaaaaagtaatgacggctggttcatatattcctaacgatgtcaaaatggatgaaggaaccaacatttatttaattacaggtcctaacatgtctggtaagagtacctatatgagacaaatggctttgattgcgatcatggctcaagtaggttcctttgtgccagctgatagtgctgatttgccaatttttgatcaaatttttacaagaatcggagcagctgatgacttaatttcaggtcaaagtacctttatggtagagatgagtgaagctaatgaagccttgcagtatgctactaagcgcagtttggttctctttgacgaaattggtcgtggtacggctacttacgatggaatggctttagctggtgcaattgttaagtacttacacgacaaagttggtgctaaggcattatttgctacgcactatcatgaattgacagtgatggatgagactctggatcatctgaaaaatattcacgttggtgctaccgaagaaaatggcaagttaatcttcttgcataaaatcctacctggacctgctgatcaaagttacggaattcatgtagctcaattagcaggtttgccgcgcaacgttttgcgagaggcaactaaattattaaagcggcttgaagcacaaggcagtgaactagcaccagtttcgcagcaattagatttatttgcagagcctgtggaaaacagtgttgaagaaactgaaacacaaaatgacaagcccgcaataactgatgcacaacaagatatacttgatgatatttctaatctttatttagcagataagacaccgttgcaggttatgcaaatggtagctgattggcaaaaagatttaaaggatgacgattaatgagcaaaattcatgagttatcggaaactttaactaatcagattgcagccggagaagtaattgagcgcccagctagcgtagttaaagaattagtagaaaactcgttagatgctggtgctactcgaattcgcgttgattttgtagatgctggtttgaaacagattgtagttcaagacaatgggacggggattgcacgtgatcaagttgatctagcctttacccgacatgcgacaagcaagattgccaatgaacacgatttatttaaagtttccactttaggcttccgcggagaagcattagcttcgatttctgctgttagccatgtggaaattctgactgcaactgaaaacgcaattggtattcgagctaactatagtggaggcaataaaaaaggccaagaagatgcagcggctcgtaagggaacaaaaattacagtcaaggatttgttctttaacacgccagccagattaaagtatttgcgtagttcaagaactgaaattatgaagattgtggatattattaatcgacttgtgttaggttatccacatgtgtcttttactttgtcaaatactggcaaaattttattaagaacgccaggaaataataatttaaagcaaacagttgctaacgtgtatggccgtcatatcgcagaaaaaatggaaaaatttgaggcaaaagacagcgattttaagattacaggtctgatgtctaaaccggaattaacacgttctacacgcaattttatttcgattctcttaaacggccgctatattaaaaattttcaattaaatactgcgattctggatggctatggctcaaaattagcagcgcggcattatccgattattgtgttagcaattaaagtagatcctttgttagtggatgttaacgtgcatcccactaaacaggaagttcgtttatccaaggaaaaagaactgggtcgtttaatcaccagtgcaattagtaatacacttgtggaaaaagttggacaaattagcgcttttgctaatttggaaaataaacgtgatacgctagttgatcagcttagttttaacttaaatcaagatgttgtaaatacagctcgtaaaaaagaaccggaaattcgcgaacaagaaaagccaaaatttttaacgattgaatctgatgattcagaagataatattcaaaatgaggcggtaaagcaggatagtgaaaagaaatatgttgatcttaatcagccacgtgaagatgatcaatatatcgttactaagacctggaaacaaaatgttgctctgcagcaagcactaacgccatttcctacaactaggactaatcaggaagtcatttcaagtggggatgaaactttagctaataatctgcctcgcttggtttatgttggacagaccgatacttatttatttgcccaacataatggcgacctatttttaattgatcaggttgctgctagacgaaggttaaaatttgagcaaatttttcacatgataactgccaaaaaagtagtacaacaaggtttgttaacaccaattattttagaatttggtaatcttgattttatgcaaattaaggatcaagtagaacagattaagcaggttggaatctatttggaagattttggacaaaatagttttattgttcgttcgtatccaacttggattcacgataatgtcgaagattcaattcggaagattttagatggttatttgaatgtggataaaggaaaggcaaagaacctgtttagccggatagcagcaatgcaagctaagcgagaaattactggcaagattaaattatctgcagctgaagctgagcaaattttacttgatttacgcaagtgtactgatccatatcatgatgcagatggacggataattttggttagaatgagccaaaatgaattgagaaaaatgtttaagaaggatgaataatgtacgaatattttgaaggtgtgattactgtggttacaccaagctatgttgtagttgatgtcgggggcgttggctacaaggtctatagtcctacaccttttgcctatactcaaggccaaaaagctaaggtctttattgagcaagtggtgcgtgatactggcattactttatatggttttcaaagtcaagatgataagggcttgttcttaaaactacttagtgttagcgggattggtcctaagagtgcaatggcaatcatggcagctgaggatagtaattctttggcggaagcgattgaacaaggtgaagttaagtacctaactcgttttccaggtgtgggtaaaaagacggcttcacaaattgtgcttgatttgaagggtaaattaggtgattatgttgctcggcttgatcgtccagacaatggtgagaatgtgccgccagcattaaatgatgcactgcttgctttaattgctttgggttatacccaaaaagaagtggatcggatcacgcctaaactggagaaagttgctgcaaatactgcagatcaatatattaaaaagggcttagcattactgcttaaaaagtagatcttggtataatagaacagatgattattttttaaggaagtgaaactggtggcagaagatcaagtaacttcaggtgatattgagaatcctgaagaacaacaaatggaactttctttgcggccgcaaacgctcgaccagtacttaggtcaaaagcgggtcaaaaaagaaatgagcatttatattaaggcggcgcgccaacgtgatgaagcattagatcacgttttgctttatggaccaccggggttaggaaagacaactttggctttcgtaattgccaatgaattgggagttcatttaaagagtacaagtggtccggccattgaaaaggcaggcgacttggtggcacttttgtccgacttagatcctggggatgttttgttcattgatgaaattcaccgtttagctaagccagtagaagaagtactctactctgcaatggaagactactatatcgatattgtgattggcgaggggcagactactcatgcagttcacgtgccgctgccaccatttactctaattggggcaacgactttggctgggcaattgtcagcacctttgcgtgatcgctttggcatcgtagagcacatgcagtattacactatcgatgagctagaacaaattgttttgcgttcaagtgatgtttttcacacttcaattgcgcctgaggcggcccatgaattggcacgacgctcgcgtggtacacctcgtgttgccaatcgcttacttaagcgggtgcgtgattttgcggaagttaagggagaaaaaacaatttcgctcgagactactgaaggcgcgttaaaacaattgcaggttgacgatgagggacttgatcagacagaccgcagattattgagaacgatgatcgaaggatataatggtggtcctgttggtattcggactttggcagctaatgttggtgaagatatggaaacgattgagtcactatatgagccatatttgttgcagcatggttttattttactcacgccgcgtggcagaatggtgacggataaagcatatttacagttaggattaccaattccaggtgataaatagtcccattttctgtataatggttataatatctagaaaataattttaatgaggtggaaattttgaacattttatttttagcaaatgccggtgctgcagcaagtagcaactggatgatgatcggtttatttattattttgatcgctttcacttactttggtatgattcgtcctcaaaagaagcaacaacaacaaagaatgcaaatgatggacaaattgaagaagggtgacgaagtcatcttagttgatggtttgcatggtaaggttgacaagatcaacagtgataagactatcgtggttgatgcagatggcatttacttaacttttgaaagaatggctgtccgtcgtgtgattccagttgctgcaccagcaactcctgcagctgaaactaaggctgaagctccagcagaaaagccgaaagaaaaagcagacgaaactaaaaaagaggataagtaatcatattacttaagagcgtcattttaggcgctttttgttttgctaaaaaaatccttgttgtaaaatagaagtgataattttagttcaaagaaagggatctgaaatgaagaatattcccgttgtaatgattctttttggtggtagtggtgatttggctcaccgcaagctttatccagctttgtttaatttgtatgaacaaggcttaattcacgacaactttgcagtaattggaactgctcgtcgtccttggtcacatgagtatttgcgtgagcaggttagtgatgctattcatgaaacgcacgatactgttgatgaaaatgagttgaaagcttttgcaagtcatttttattatcaatcacatgatgtaactaatgtggaacactatgagattttgaaaaacttggcacaagagctcgatgatcgttatagtgcacaaggcaatcgtctcttctacatggctatggcaccaagattctttggcacaatagcaacgcatattaatgaccaagacttgactggtagtggctttaatcgaattgtagttgaaaagccatttggtcatgatttggcttcagcagaggaattaaataagcaaatcacggcttcatttgatgaaaatgatatttttagaattgaccactatttaggtaaagaaatggttcaaaatatcatgccaatgcgttttactaacccaatggttcaaaatatttggtgcagcaagtatattaagaatatccaagttaccttggcggaacgtcttggcgtggaagcacgtggaggttactatgatacttcaggtgctttgcgtgatatggtacaaaaccatatttttcaaattattactctgctagcaatgccagaacctaaggatctttcttctgctagtgttcaccaagccaagcaagatttgcttaagagtttaattattcctacgccagatgatgtcaagaaatactttgttcgtggtcaatatttgggtagtgatactacttttgcttataagcaagagccaaatgttgatccagagtcaactactgaaaccttcgttgcaggtaaagttaagtttaatgagggaccaattgctggcgtaccaatttactttagaacgggtaaggaatttaaagaaaagaagaaccggattgacattgttttaaagcatattaataatccatatgggcaagctcattctaacaatattacgatcgtgattgacccaactagtgaaatttactttactattaatggcaaacgaattgaccaaccaggaattcgccgtgaaaacttaacttatgaattttcaaaagccgaaatggctaaggtacctgatggttatgaaagattgcttcatgatgtttttgtcaatgattcaactaactttacgcactggagcgaattgaagcgttattgggaatttatcgatgcagttgaagatgcttggcagaaggaaaatgaagcaggcaatccagccattgcacaatatttgccatacagaatggggccaaaggaagctaatacaatctttgagtcaccaactgaacattggatttatgaataaagaaaatttattaccgcaaaatgacatccatcgtcggattattcatctggacatggatgctttttatgcttcggttgaaatgcgggagcatcccgaatggaaaaataaggcattgattgttgggcaagatccacgacaaaatggtggacatggagtagtggctacttgcaattatgtagctcgtaagtatggcgttcattcagctatggccgcaattcaagcagtacgtttggttcccaaggagctaatagtttttactagaccacgatttgataaatatcgtgcagtgtcagctaaaatccattcttttatgcatgatgtgacagatcaggttgaatcagtggctttagatgaagcttatctagacgtgacacatccaaagatagagcaggagtctgcagttcaaattgctttagatttacagaaaaggattcggcaagaagtaggcttaaactcgtcttttggcgtttcctataataagtttttagctaaaatgggatcagaatacgccaaaccgtttggtcgaaccgtaattttgcctagtgaagtgcagaactttttagcaatgcaaaagattgagaagtttcctggtattggaccgaagacgcaagaagagctgcatcagatgggtgtttatactggggcagatttacaaaaaattgaggttttaaccttaattaaaaaatttaagaaaatggggtatattttagcccaacatgcacgtggaatagatttaagacctgttgttacagactcagaggctaatcgaaaatcaattggcatggagcggacttacgagcctgcaatttatactgaggatgaagccctaaccaatattcgtaactattgcaatcatttggaagcagcattaaaaaaacgcaattttaaggcaggtactgttgttattaaagtaagaaataataattttgatacggtaaccaagagaaaaaagttgaaaacaccttctgatagtcacttagatttttatgatgtggctcgtgacttgttcgaagcaacaagttcctttttagatgatggaattcgtttattgggagtcactgtaactgactttgaaaagaaaaaatatcaatcaatcagtttgttcgactaataaataaagctatttttctggtaaactagatacagatatttttacaagatgaggagattaaaaatgagtagttttgatgacatttatgaaaaaatcttacaatatcctacaattatcttgcaccgccacactagtcctgatccagacgcaattggttcacaagctggtttagctagagcattaatggaaaaattcccggacaagcgcatactttgtgctggggaaaacgatgaaggcgacttagcttggattaaccacatggatcaagtcaaggcaactgattacgaaggtgctttggtaattactactgataccgctaatacaccaagaatttctaataagttgtatgataagggtgactttttaattaagattgaccaccacccagatgttgatccatatgctgatatgagttacgtagatccagatgctccagcagcatgccaaatcattgtagacttcttgaatgaagagggctttaagattaccaaggaagttgcttacccactttatgctggaattgtaggcgataccggtcgtttcatgtatccagaaacttcagagcatacttttaaggtggctgctcaattagcttctactggaattaacattactgaaatcgctcgtaatattgctgatgtaacttttgatgaggcaaaattgcaagccttggcaatggacaagatggaaattgatcccgttggtgcagcttttacaattttgatgcagtcagacttgaagaagttaggtttgactgatgatcaagcaaatgttgctgtatctactccaggacgtattaaagatgtgcttgcttggaatgtttttgttgaaaaaccagatggtactttccgcgtacattaccgttcaaagggccctgtaatcaatgaattagctgctaagcatgatggtggtggtcatgcattagctagtggtgctaacgctaaggatatggacgaagtaaagcaggtatttgcggaagtcgttgaagtaactaagaagtttaaagaagatcatgaataatatttttatagattcaagaattaaaccagctattcaggctggtttaaagaagatccattttgaaaagccaactaaggtgcaggagaaagttattcctgctatgttgtctgacttgagtgtagtagtgcaagcagcaaccggttcaggaaaaacgcatgcttatttagtaccaatttttaatgaaattgaagaagataaacgctatgttcaagcaatcgttactttgcctagtcgtgaattagccgatcagctttatcaagtagcacggcagctccgtgatgcggcagggatgcatttttcaattgcacatcttgcgggcagaactgatcgtgaacgtcaattagaaaagtatcaaaataatactccacaattggtgattgcaactccaggacgtttgttagactttgttcaaaagaaggtttttgcagttgatcaagtaaaaacttttgttatcgacgaagctgacatgaccttggacatgggctttttgaacgacattgatcaagttgctgctaaattgccgaaggatgtccaaattgctgccttttcagcaactattccagttaaattgtctaactttttacgcaaatatatggctcatcctgatgatatcgttattgataatcctagtgttattgcgccaacgattaaaaacgatttgcttgatattggctcaaaggatcgcaagaatgtcttgtacaaattgttaactatgggacaaccatatttggcgttggtttttgctaacactaagcaaaaggttgatgagttgactaattatttgcaagatcagggtttgaaggtagctaaaattcacggtggggtaactgaacgtgaaagaaagcgtactctgcgtcaggttgagcaaggacagtatcaatatgtggtagctagtgacctagctgctcgtggcttagatattgatggtgttagtctggttgtcaattatgaaataccacgtgatattgagtttgtaattcaccggattggtagaactggccgtaatggtttgtcaggtcacgccattactttgattcgtgaagaagaaatgaaccggattgaagacctagaaaaaatgggtgttcattttgactttgttgagattaagaatggtgaattagtgccacgtaaacactatcgcagtcgtgaaaatcgtcaaagcaagaatcgtaagcttgataccaagctggtgggttacgttaaaaaagagaagagaaagcgtaagccaggttacaagaagaagattaagcgtgcgattcaagaggataatcgtcaaaaacgtaagttggaacagcgtcatgaggttcgtaaggcaaaacgtttgagaaagcgcaagcgtgaacaagggctttgacagaagcggattttgtagtacaattatttcagcttaagatatgttttttgatcaattatttcaaagagagagccagttagatgagaatggcttaataatagtcaaaaaatgctcctttaagtttcataattaagaatatcaagaggtaacaaacactgttgcaatcaaggtggtaccgcgcgtggagcgtccttgaagaaagcaatagtgttttttatttatttttagggagatttattttaatgaagaaactaaatagttcagagtttcgccaaatgtttttagacttcttcaaggatcatggtcacatgattatgccaagtgcatcattaatcccacaagatgacccaactcttctttggattaactcaggtgttgctaccatgaagaagtactttgatggctcagttgtaccaaaaaatcacagaattacttcatctcaaaagtcaatcagaaccaacgatattgaaaatgttggtaagactgcacgtcaccaaactttctttgaaatgcttggtaacttctcagttggtgactactttagagatgaagctattccttgggcatgggaattcttaactagtcctgattggcttggcttgccaaaggaaaagctttactgtactgtttatccaaaagatgaagactcatttaatgtttgggtaaaggcagggatgccagctgatcatattgttaagttggaagataacttctgggatattggtgaaggtccatgtggtcctgatactgaaatcttctacgaccgtggtcaagaaaacaacgacgttgctgaagacgatccagaaaacttccctggtggtgaaaatgcacgttaccttgaaatttggaacatcgtattttcacaatacaaccacttgccaaatggcaaatatgtagaccaaccacacaagaatatcgatactgggatgggactagaacgtgtgctttctattttgcaagatgcaccaaccaactttgaaaccgacttgttcttgccaattattcacgccactgaagaaatgactgatgacaagaagtacggcgttaacaaggaagacactactgctttcaagattatcgctgaccacgttcgtgccgtaagttttgcgattgctgatggtgcgcttccttcaaactcgggccgtggttatgttcttcgtcgtttgatccgtcgcgcagacttgaatggtcaacgcttaggaattaagggtgccttcctttacaagttggttccagttgttggaaaaatcatggaaagtcactacccagaagttatggatcaacgcggctttatcgaaaacgttatccaaaacgaagaagaaagatttcaatcaactcttgatactggtttgactttgcttgacgacttaatcgacaaggcaaagaattctaaggataagaccatttcaggtaaagatgccttcaagatgttcgatacttacggcttcccatatgaattgacttttgaatcagcacaagatgctggccttaaggttgacaagaagggctttgatgcagaaatggctgctcaaaaagagcgtgcacgtaaagctcgtggtgaccttcaatcaatgggacgtcaagatgtaactttaatgaacattaaggataagtcagtctttgaacgtgatacttacgaagaaccacatgcaaagctagttgacattgttgttgatgataagttggttgataaggccgatggcgaacatgctactttggtctttgacaagactccattttacgcagaacgtggtggtcaagttgccgaccacggtgacatttacaaccaagacggtgaattggttgccaaggttactgacgtacaacacgctcctaatgaccaaaacttgcactttgttgatttgattttgccagttgaaaagggtcaagaatacgtattgaagttagataaggaacgtcgtgaagggttacgtcactctcactcagcaactcaccttcttcacgctgctcttcgtcaagtcttaggtgaacacactcaccaagctggttcattagttgatcctgactacttaagatttgactttactgcaatggaaccaatgaccaagcgtgagcttaagaccgttgaagaattggttaaccaaaagatttgggaagctattcaagttaagactactatcactacccctgaagagggtgaaaagatgggtgctttagccctctttgatagcaagtacggtgataaggttcgtgttgttcaaatgggtgacttctcaagtgaattctgtggtggtactcacgtggacaatactaaccaaattggaatcttcaagattacttcagaatcagctgtcggtgctggtatgcgtagaattgaagctgtaacttctaagaaggcttatgaatacttggcaaaccgttcagacttacttgatgatattcaagaagaagttaaggcaaccaagccagataacattgtcgataagattgattcacttgaaagtgatttgcacgatgctcaaaagcaagttgaaactttgaacaagaagatcaatgctgctaaggctggtcaaatctttaatgacgttaaacaagctggtgacttgactgtcattgctgctactgcagatgttaacgggatgaatgacttgcgtgaacttgctgataactggaagagcggcaacaagtctgatgttttagttttagctgctgaaaatgctggcaaggctaatatgattattgctttagaccaaaaggcattagacaagggccttaaagcaggtaacttaatcaagatcgctgccccaatctttggaggtggcggtggcggccgtccaaacatggctcaagccggtggtaagaatccagcaggcttgaatgatgctattaaggcagttattgacgaaatttctaagaactaagaattaattaattgtgtttaagctttttttcaagtaaaattgttgacaggaggaataaatatgagttcgctagataagactatgcattttgactttaatcagaacaaaggaaaaaatgtttatgatactctgcaagatgtttacaatgcgcttgaagaaaagggctataatcctattaaccagattgtaggttacttactttctggcgatcctgcttatattccacggcataacgatgcccgtaatttgattcttaagcacgaacgtgacgagattattgaagaacttgttaagagttatcttggtaagaataaataatgcgtttattaggtttagatgtaggttctaaaactgtgggagtagcaattagcgatgagctaggaattactgcccagaagttggagactatccagattgatgaaagcagatataactttggtatgcgtccattgaagaagctagtcagacagtatgaagttgacggtttcgtattaggtttacctaagaatatggatggtacttctggtagttccgtagctagaagtaaggcatacggcaaacgactagaggaaaagtttggtttacctgtacattattctgatgagagattgacaacaattgaatcacgacgagtacttgttgaggatgcagggatccatgatcgcaagaagcgtaaacaagtaattgatcagatggcagcggtgctcatcttgcaaaattatttagatttacaccgaaaggattaaaatggcagcacaagttaatggtgacgatcaagatcgtcaaattactttgattgatgatcaaggtaatgaagaattgtatgagatattatttacttttcattcagatgattatgacaaatcttacgtgcttctttatccagccgctgttggcgatgatgaagatattgaggtgcaagctttcagttatgatgccgatgatgccggcgatgtaacaagtagtgatttgcatgagattgaatctgatgatgagtgggacatggtccagggagttttaaatactttcttagatgatgaccgcttgagtggtaaataataaaaagaggactggctgtggctggtcctttttgttagttttagaaaaaagataaaaatgaacaagaaaatattagagattttagaatttggcgaaattactaagcgcttgagtaaattagcgattactggtcccgctaaaaaagaagcggaggaattattacctagtggtgattttgaacaagtacaaaatgagttaaagcagactttagctttgactaatttgctacgaattaagggacaacttcctttaacggactttcaggacgtacgtccaagtactaaacgtttaagcgtgaaagctaatttaaatgctaaggaattaggtaatttattattagtattaagtttagctcatgaaattaatgactttttggcagaaatagatccaaacaaactggatttaactgcaattgatgaaattttagatcaattagatgtgccggatcttttatttagagaattaaagaaatcagttgattatgatggtgaggtattagatacagcctcacatgaactagctcgtttgcgtcatgatatacgttctaatgaagaggaaattaagaataagatggatgcttatactaagggcaatagtagtaagtatttatctgagcaaattgtgactattcgtgatgatcgctatgttattccagttaagcaagaatatcgggcaaaatttggtggggtagttcatgatcaaagtgccagtggtcaaacactgtttatagagccggaagccgttttaaatcttaataaccgccaacagaatttaattgctcaagaaaaacaagaaattcgtaatattttgaagcacttatctaatttggctcgtgaagaaattactagtttgaataatattgcggctgcattaactgaactagatttcttgcaggctaaagccaagttagcaaaagaaatgaaggcaagtgagcctcgtctgacacaagaccattctttgaacttattaaaagcgcgtcacccattgattgacccagaaaaggtagtacctaatgacattcgtttaggtggtgaatttgatactatgctgatcacggggcctaacaccggtggtaagacaattaccttaaaaacagcaggattgcttcaattgatggcacagtctggattatttatcccggctgaagaaggtagcaaggttggcgtctttaagcaagtttatgctgatattggcgatgaacagtcaattgaacaatcgttaagtactttttcatcacatatcaatgacattattgcgatcatgaagaatgttgattctgagaccttagttttaattgatgaaattggtgcagggactgatccagaagagggtgctagtttggcaattagtatcttagactttttgcgtaaaaaagatgctaagatcatggtgacaacgcactatcctgaattgaagctttatggttataatcggccacggacgactaatgcctcaatggaatttgacttaaagaccttgtcgccaacttatcatttgcagattggtattcctggtcatagtaatgcctttgccattgcccgcaagctagggatgcgtgaagatgttgtcaaaaatgcccagaacttaatgtcagatgaagattctgatattaataagatgatcaccaagttgaatacgcaaaccaaggcagctactgtggctcgcaatcgtctgcaaaccagtttggatcggagccaaaaattggagcaaaagttgcaacaagcacttgattggtataaccaacgtgtacaaaaacagcttgattttgcacaagagcgagctaatgaagttgttgccaaacgccgtaaaaaagctgatgagattattgctcaacttgaaaaacaaaagaacatgggcgtcaaggaaaataagattattgaagctaaaggcgaactcaacagtttagagcgtcaggctaataatttggctcataataaggtcttacagcgtgaaaaacgtcgtcaccatgtaagtgtaggcgatcgagtaaaggtcctctcatatggtcagacaggtacgattactaagaagttatctgaacatgaatatgaggttcagatgggaattatcaaagttaaggttagtgatcgcgatattgagaggattgaaaagggcgaaagtactaagcctagacaaactgttagagcaaccagtgcggttagaagaagtaatgctcatagcgagctggatttgcgaggccaacgctatgatgaagcaatgactaatttggaccgatatattgattctgttttactggcaggacttgatacggttacgattattcacggtattggtactggtgcgattagaaaaggtgtttggcaatatctccgcagcagcaatcatgtaaagaactttaattatgcaccagctaatgaaggtggcaatggtgcaacaattgtacaattaaagtaagcgtcttacttgcaaaaagtaagtataatagaatatacttataatataaataaatgaattgaaaaaatgtgaggtaataattatggttgaagcaattaatgatcaaaattttgaagaagaaactaagaatggtgtagcattagtagacttttgggcaacttggtgtggtccatgtaagatgcaatcaccagtaattgatcaattatctgaagaacgtcaagacgttaacttctacaagatggatgttgaccaaaatcaagatacagctaagaatttgggtattatggctattcctactttaatcgtaaagaaggatggcaatattgtagaccgaattactggttacactccaaaggaaaagttaaaccaaattttggatcaatatactgattaatttaaaaatcaaaaaaagcttgagacgatgttgcctcaagcttttttgatatatcacttattttgatttacttgcttttttagcaagtcacgaatttcttctaaatagtcggcctcagttggaccagcttctttttctttcttgggcattactctatttaaagccttgatcattaaaaataccacaaatgaaatgatcaagaagttaatgacagaattgatgaagctgccatatttaaatgtagcatccccaaccttaaaaacgaggttagaaaaatcaattttgccggcaaagatcccaagtagggggttgatcaagttttttactaaagattgtacgatagcagtgaaggcagcaccgatgattacaccaactgccatgtccattacattgccacgtgaaataaactctttaaattctttaatcatgctctactcctatatctaatatatctaaaaaaatgcgattttaactaaagtatatagtagtggttatttatagtctatcaatttgcttttaaccgaagcgagcgataaattgaactttcttttctttatctaaaatattaatttcacattcggtggttcgaccagttgatttttgaaatgcttccgcgatcattccgccttcaagggagaattccttgctggcgctattcaaacgatcagtgacagtttggccacttaattcgtaagtagtaaatgatcgtctttctttaactttttctagcttaccaaattcagccatgttgaagaattcaactaaatcatcataatcacttaaatcatattttcgcgcgattctcttgccagcccaataaagaattgaggcgtcatcatcgcctaaaatagttggcaaaaggaaatcgcggtaaagttggttaataaaatatacgtgctcgtttgtgttttctgtcataaacttgttcatcccttttattcttttttattttaccgtaaactagtataagtagaaaataaatttttgattttaagagggttttattatggataatcgtccgattggattattggattcagggctaggtggcctatctgttgcaaaaaaagtaattgaaaaattgcctaatgaatcaactgtttttattggtgataacgctcatatgccgtatggcgatcgaactaaagaagagattattgaactagttagaaaatcagtccattttttgttagataaaaatgttaagctgataatttttgcctgcaatactgcgacagcaatggctatgagtacgattcaagcagaaatcgatccacaaattatcggagttattcagtcggggagtttggccgcttcacggacaactaagaataaaaaagttgcggtagtttcaactaaagcaacagcagaatcacatgcttatgctaaagagatccgtttccgtgatccagaaattcaggtaacggaattagctgctcctaaacttgcaccacttgtggaggctcaaaaagatcatgaaaccaacttaaaagtagttaaagagagtttgacccccttacaaggaaaagactttgacactttaattatgggctgtacgcattatccattgattcagaaagaatttaaagaagcaattaatgataaaaatgttactatcttggatcctgcagatcaagttgcacagtatacgtttaatgtgatgcggcgcaatggtttgtttagtgatggtaatgaaaaagtcagtcatgaatattacactacaggcgatccaactagttttgatcatttagcaaggacattcatggatgatgcaactttaacatctaagcatgtggatacggagaatgaataatggttaaagaaattttatttgcgactggtaatcaaggtaaagcaaaagaactaaaagaagcctttaaacaagctggggtagatatcgagattaagacgaatgctgacttagacaatccgcctcatccgattgaaagtggccatacgtttgaagctaatgccaagattaaggcccatgaattagctgagtttagcaagttgcctacgattgccgatgattcaggtttaatggttgatgccttaaatggggagcctggtgttagaagtgcacggtatgcaggcgaagctcacaatgacgcaaagaacaacgccaagttattagctgaattaggcggtgtaccggatgaaaaaagaacggctaaattttggactacgattgtagtttcgatgccaggtgaatttgataaagacttggttgtgtcaggtacttgcagtggtcgtattttggccgcaccacgtggtgaagatggttttgggtatgatccattgttttatattccagaaaaagaaaaaacttttgcacagatgactactgatgaaaagaatgagatttctcatcgtggtaatgcagtgcgaaaattgctccaagaattgccagcttggttagaacaatttgattaaggtaaaaatagctcagttcgggtcattcgtatgatttgaactgagttatttttagtgaaatgaggtggatatatatgtcaaaaagtattggggaagcgctgaaagaggaaagacggtctttaggattaacacaggaacaatttattaaagggattattagtgaatcgttttattcaaaagtaggacgaggtaagaatgaaatagtagcagtagatttactaaagattttagctgctaataacattagtgaagaagaatttttaaataaactaaatgttaaggaaaataataatttagaggaagacttaaaagttcaattacttaatgcatattctattcatgataaaaagaaaatcagtatgttagtcccaaaaatacaaaatgcagctatggatgaaaatactaaaatatcagctcgtttgattgatgcagttgtaaataataagattaatgatttaactcaaagagaaattacacaaattaagagaaaattttttgaagttgatgattggaccaaaaatattacaaccttacaacttttttgtaattcaatgcttttgtttgattttgatgagctggttctttttgtaaaaaaactggaaaaaacatgtaaagggaagttgatgaaattaccatttaatactcaaaagataattgcatcgatttgcataaattattttcataattgttatacaaatgattgtagtcgaaactgtcaaatcttttgtgtaaatagttctttctcgtaaattgattttttaattatttatttaatcaaagtaggattctaaggtgtcctgaacctgaccaaagcctttatgaattcgattgaaataacggtcattgtagctcattgcctgaataccaataaaagcatcaagcgactgttcagttggaaactctgccttaggcttagctttgcgcttgatcacattgttaaatgattcaatcatgttagtcgaataaattgaagctctgatctgcttgggatagttataaaagaccagcagatctggttctatgtctttcaagcttctgataacatggctgtaaaccttgccccatttggtatagaagtcatgcaggacagctgtggcttcttctttgtttgtctgttgatgcacctgtttgaattcgttcatgatcttttcacgatcgtcgacgcgtactttagcgcagatattgcgcatgacatgaaccaaacagcgttgaaaatgagctttaggataagtcctggccaaggctgttttcatgccaacaacaccatcagaaagaaagagttcaacttgcttcaagcctctggacttcatgttttgaagcatctctgtccagacttcaatgttctcactaggagcaatgcagtagtcaatgacttccttatgtccattaggtttaatgccaatggcaatatagactgcttcacgctcaacgctcaaacgtttctcggcgcaaaggaaggtatgtcgcatccaaatagacgcagaaaaacttgtcgcttagcttgcgtttgtggtaagcctcaacctttggaatcatctgcttggaaatatttgatacctgagctggactgtaatggctgccatacatcttttcaattagatcggctatttccctggtggtcacgcccttggagtaaagcttgataatcatgctttccaagatatccgagtgctgcttgtagtcaggcagcgtgtgctgatgaaattgaccgttgcgatcccgaggcacttgcacttcaattgggccaaattgcgtatcaactttgcggaaataagcaccatttctagagttgccagtattccagccatttctggcatagggatcatagcccagaaaggcagtcaattcagcttctagcaagttattaacagcctgttgtagttctttgcgcaataaatcatttattttgtctggattgaatagagcttgagcaaaatctttggtaaaatcattcatgaaggagttcttctttctgtatgtgtttttttgttcaaaccaatcatacgagaaaggaactcctttttctaatgtttaaagaaataaatttaaggaatcattcatccttacacaaactattttacagtctcaagatgcaagctatggttatgaaataatagaagaattagctaatattccggattttggaatatatgtgatagttactaatttttataaggcatattttcaaggcaataaaaagcaaagtcaacagatattagatttcttgaatcagaatggactaaacgaaatatctagcagattgccatagtcatatatgaagacttaattcaaatatgaagagtattagatttttttaatgtttatactataattttaataattaatgtaactcttaggattagcctaagggttattttagtaacaaaattatttatgtggagaaagaaaaatgagatcgcaatatttccaagccacttttcgaattgcacgtaagtcgaaaaagaatatgttgcttgctgttttattggtactttgcatgatttttgctgtactggttgtagaaaagcagaaaatcaacgatggctaccgtcaatggcgagactacaatgagtcagttcatgttaatgcagattatttttctagcaatttgctacgaaaaaaggattacaaacaaacttttaataatctgaataaacaggctgagtatttggccggtgtacaaaatggtgaagtatttgattcgcctcaagattatttgcaaaattccaaaaagttagtgcaaacgatgctggcgggttatcaaaataattatcgcggtgcttcaacgctaaatgttccaccgaagtatcaactgcaacaaaaattagtagtttatgattatttgtaccaacatcacttagcaattgtcatgaattctaaagaatctagcacctacttaatctatattttaggattagtcggcatgttcttatttttctacgttttatttattgctagtgatagctggatgattaatttatcacatccaactctgcttaaaaatattccttatcagattagggatgaagttgaaggcaaatttatcatcaatcttgctttgactttgcttccgttagtgattggtgtgttaggaagttacttatttgctggttttaagaatggctttaatagtttgaattatccagcagttttgtatttcggtaaaattagcgcggttccactgtggctttattgtttgttgtatttagtctatgcagttgtactagtgatgtttgtgactagcctggcattgttgcttaatcaattaactcatagcgtttatctaacgatttttattgcggcattggtctacagtatttcacttttaccgggtagcattgctaaatatcttttctttttaccttcagcttatctaaatatcagtaaggttttagatgggactgttgcaagtcaatcaattattccggcaaattgggcagttggtatgactattttactagtgtgggctgtagtgctggtaatctggttcaggcatttggttaaccaaggtggtgttgaaaaatgaaaaggcaatattttttatttcaattaaaaatatttttgactaatcctaaaaatgtggggctgtttttcattaccgtcgtgcttgcactttactttggtttagtcagcgcaccgcagcatcatgtgattgaagatgttgatccatatgcaatttcaaaagaatatcaagatgatcaagcctttttaaaggtggctgaaaaagaatttgcacgggcagataaaggtacttcggattatgatcccagtgaaggtgctaaagatgctgttaccacatatccgaccatcattaagtatgaccatgagcgtttaaaagcacttaagaatcatgattggcgtttgtataccaaatacagtagcaagtggtatcagaaaatggataatttgatttgggttaaagaaaatcagaattacatgtatcccttggaatactaccacaataataattacaaagaagatggacattttgggtatcaaagaacatttcacttctatgatggtttacttaaaagtaaagcaaaattagacaaaaatgttttagaagaacggactactttacagagattacagcagtcgctttctgggtggacgatgattattttaattgtgattgttgttttgtttgcggcagatatgataaccaatgatcaaaaataccgtacagtagtgaagaatattcctctttctaaaaggacaattctttggctaaaaactgcggttattgaagtgggaattttatttaactttctagttgcttttttagtcgttacgttgtgtactgcgccaaggtatggttttggctcctttaatttattaacgccaatttatactggtcgtctgtatttcaaaacgccctttgtttatcagacgctgggacaatattatcttggtttcttgatctttgcagttgtaattacctttattttcattagattgactttattattgtcgctgatttttagaaatgaatatgtagcggctattatttcaagtgttttggcaatgagtgctaaagttctttatttttcattgggtatgggctttgtttatccatttttgaaacacttaccaatgacatattttacaatcggcgaaagtttgactagtaatttatcgtatttaatggactcaccaggttgggactttaatgatgggattattccgttagttacattagcaattgtaattgaattaactatttggctattttgtcagtttagaaaagtagtattagtgaagtaggtgaaaacatgttaaaaattcataatgttaaattagcttttggcgaacatgttgtcttagatgaaattagtttaaattttcaaataggaactatcgtaggtttagttgcaccaaatggtacaggaaaatccacactactaaacgtaattttacataatcttgagccacaagctggttatgtagaatatgatcatttacgttatcgcagcaatcgtgagattattaaactgcatcgactgatttgtgcttttcctgatcaaagtgatctgtttccatttatgagcggtagggatcatttaaagctttatgcggatctttggaaaaattcggataaaaatgtagataatattattaataaattacagatggaaaaatatgttgatcgcccaacacaaacttattctttggggatgaaacaacggctttgttttgccatggtggttgcagctgatacgccagtaatgcttttagatgaggtgatgaacggacttgatccccaaaacgtacaattgatttcagattacttattagatctaaaaaaagaaaataaattgattattatggcttcacatttgttaaataatctacaatcttacgcagatcgtgtacttttcttgaaggcaggaaaggtaattgaagatctcgataatcaacatcaggctaagcagtatctgaaaattgaggcgaatgcaatagccgggacgcggttaaaagataaaagatttactaagttacctgataataaaattattgtgccactggatgataatctaggattagatcaacttatacttaaattgactaaagagaagattccatattcagttggtcgaattgatttggcagaattatttagtaaattttatggctaaggcaatttgattagataaaaatagctcagttcgggtcattcgtatgatttgaactgagttactttttacttattttgcagtagtttttgcaggtcgttctgtacttgcaaaagcaatattattttctcgtaaaatttgaatatattgggtcaaatacaaatttttcacagcagattgtttaccaggcttaacttgaaaatgaatggaataaacaaattttttccctgtttgttcggtcacaccgacaatagtaggacctgatacaattgtctttttctcaggctggatcttacgattgcattctttgattaacttgttaacttcatcaatatcgtttttggtatcaagatccaaattaatgtctagtgctacaccgccatgggctaggttttgcacaatggtaatgttgcggttagggatgaaaataattgagccatctgaacccttgagacgagtagttctgaggcctagttgcacgacggtaccaacattagtgccaatctgaactaaatctccaacatcaaattggtcttcacttagaataaagaaaccgttgaccaaatcactaacaaagccttgtgcgcccattcctaaagctagggaaaaaattccagcactggctaacaaggtgccaactggtacacctagaatagagagaataccgaataaatagaagaagataagggtatattgaaaaacgctgttaatcaaagctgtgatagttcgagttcttttattcttaactgtgttatgcttggctaagtaattattaattattttatgaccaaaatgggataaaaggtaaaaaatgagtgaagtaatagctaattgccaaataattgacaataaattttggctaattttactccaatcaatttcaattttctgtatatttatgtgagtaggaatcttcatttggtgtcctttctattgcttacgggtataattaagaataacaagacattaattgagaataaaggatattcatgctaaactttttttagatgttgatggaggtagaaaatgacaatttcttatggtgctttagcaggcttaattgcggcgattgcattcttaattttagtattatttacgattccaatgctaattcggaccgcgaagttgttgaaagaaactagtgcaactattcaaacaactaacgagtcaatgaagaaaatttctgaagatatggatggcttgatggatcaaacttcggatttgttagataaaactaatgacctaatgaccgatgttaatggtaaaatgaagacgttagatccagttgttaaagctgctgcagatttaggcgaaagcgtatcagaattaaacgattcatctaaaaagatcgctaaacgctttagcagcaatcatttaagccgtacgggtcttatttcttcaatagctgcgacggcatttgcaagacgcaagcgtcgcagaggtgaaaattaataaaggaggaattcaccatgaaaaaattcgcaagtttcttattaggtgccgttgcaggatgtgcagcaggttttctcgcaggttcacttcttgttagtgatgaacaagttgatgacgttaagaacaagattaaagataatgacaagcttcaagatttgaagaagaaatacgataatggtactgaaatcgttaagaatcaattagcatcattccctaagaatgttgaagatgattcagaattgaaggattttgacgacatcgtaatcgatgactcaaataaagatgacgatgacagtgaaaatgctgaagagtcagttaacgatttgaacaatgctgaaaaagatgatactgatgcagcatctacttcagaaaaaccacaagcttaattaaagtcaaaaagaaaaggagctggtcgtgatgatcaatgtcattaagttaagacattgacaaattatcgacttggacttttaagatcattcatttgcgatttatcgcatttgaatgctcttttttcatgccaaataaacccaaatcttgtttagaaattaggctacacgatataaataatatacagctgatttgggtttgagatttcttttgtcttttcgtcctggtctgatcggaattgtgtaatgactaatttgaataagaatctttttaaagatttcagttgaagaagaaattatatacatagcctggatgacaaaacatgactgtttgaaattgatcgcatattgatacttgcattttttttgtggtacatatgcttgagcatcaatttgactgactgcgttaaacataatcatgtgggcatagatctccatttcaataaatctatcctgcttggaatgaaactgtacgctacctaaagcatatttcaactttttgaatgaagtttcaatgccccagcgcaaatggtagatttctttgatcctttttaagggataatcggctctatttagattagttagaacaacttcccattcttctttgcctgatttaggatcattaattctaaatttacaggcacgaaattttattgtacataactctccaaagtcccagctgccatctttggtatttttagaccgatattttatatattgacggtaatgatggttaaccaaatgaacgttttctgtagccttatgggtttcataataataattagaggtagtcacccagcaagctatatccttatcacactcttgattaggcaactcagctacttccttaaatgcgccatatcccgttttagtacgtatgacataataacagttaggcaggcgattacaattttcaatcatgttaaagccggtataacctcgatccatagtaactatatatggtccgcaatttagctttttaagcatttgaacggcggctttacgttcatccatctttgacttaggctgaaagatgcagtcttgataagtattatttaacaggtcatagagtgcattaacatgaatttggcaatatggctttcctttatgattgagatttccaacgatattctctgatttaggattccagatttgattaaaatcagacccatcaatggcaaatatacgatatttatgatcaaataactggatattaaataaattctgattaaatacagttagaatatgcttaaaacatgcgggtgaaagctgacctttgcgttggacataagcggaagtactgactactttatcgttatttttaatagctttttggccaaaagctctaaacaactcactggtcaaatcttttccttgcatattaatagtagttttaatgactgtagctgcatctaaaaaccgcttcctagtgaaggcatgaggatcatcgataaaatcatgaatatgctttccagtatcattgataatttgatcaagacgatctaaaatatttctgtgaagggctttcataattaacaccagctttctggcaataattttgaaggtttaataatttaatcagagggcgaaaaggtaggttcttttcgcctttattttatgcaaaaaaagaaccaaatcataatgattcggttctacagagattagattcaatttgtcaatgtcttaacttaatgacattgtcgtgatgatcagctccttttttatgactaaaattagtctttaagtggtaaaacttttaagtctttgtcagtgtgagtaaaggtttcaaagccgtccttagtaacgacaccacaatcttcaattctgacaccagcaaagccagggatgtagatacctggttcaatggagaagcacattccttcttcaagaactaagtcgttaccttgtacgattgatggatattcatgaacgtttttaccaatgccgtgacctaggcggtgaatgaagtattcaccatagccagccttagtaatgatgtcacgagccacgctatctaattcttcagcggtgattcctggcttagcagcttcgattgcggcttgttgagcttcacgatcaacttcataaatttcgcgttgcttagcagtaggttcaccgtaagcaacagttcgactagaatctgatgcgtaaccatcgtgcatggtacctaagtcgaataaaactaattcatttggttgaacagtgttcatagttggaccaaggtgaggattagcggcgtttttaccagcttgtacgatggtttcaaaactttcatgcataacacctttttgaatttttagttggtaatcaatttgaccagcgatgcttctttcggtgacgccagttctaattgcgtcaaagccaatcttaaaagcgaagtctgcttctgcaccagcgccttgcaacttcttgatttcttcaggtgtcttgtaaagacgaattttttcaataaaaggtgaaacatcattagtaaaactagcgttaggaaattcaccacgtaagagttggtagtgggcaacagacaaatcatctttttcaattgcccaattatgggtatcgtgagttctctttttgacattagttgcgatgatgctccaaggattctcggaatcaagatagccgataacatcgccatcccatgcagatgcttttgcttcttctacgtttaaagctgggcagaaaataaatggttccgcatcttttaaaacaattaaagcaaagattctctcatgtggttccattgagtaaccagtaaagtaggaaatggtgattggattagaaatgtaagcaagatcattattggagtcttgcaaccattgttgtaatttatctaagttcatattgtcctcttttcttgcaaattatgtttactgtagtatatcatgatctcttaatgaaaaaatgaaagaaaagctgtaaacgtttgcattttatgcagcatcgtgatatctttaagtgaaggattttttggaaggactgagagataagagatgcataaacaagaagttacaatctatgacgtcgctcgggaagctaaggtttcaatggctacggtttctcgtgttgtgaatggtaatagtaatgttagaaaagagacacgtgaccgtgttctcgaagttattaaaagactgcactatcaaccaaacgctgtagctcaaggtttagcttctaagcggactactacagtagggttaattgtcccagatttaactaatttatactttgcagaattatctaagggtattgatgatattgcacttttatataaatacaacatcattattactagtattgaaaaccgcttgatgaaggaagaccaagttattcaaagtttgctgaataagcaagttgacggtgtaatttatatgtctaaccgtttatcagatgcagcagctgatgcctttaagcggactgatactcctgtggttttagcaggtactaaagacaatcgtgatgattttgcttctgtcacaattgactataagaaggctgatactgaagcattaaatttgatgtaccatgatggtaagaagcatttgggaatcgtagttggtgatcaagatgctgtagttaacagcgaaaacagaatccctgcttatgaagaattcatggaagaaaatgatttgggcactcctcgaatctatactgatattaaagactattcagatggttataatttatacccacaattagttaaagatggcgttgatggtgtaattgttactcgcgatatttcatcagttggtattttgaattctgcgatggatgcaggtaagaaagtgccagaagatttggaaatcgtgaccgccagtgctacgcagttagcttctgttgttcgtccagctttgactacgattaagcagccactttatgatatgggtgccgtagcaatgagaatgttgactaagttgatgaacaatgaagaagtagatgatactcatattgttttgccatatgaattagttaaaaagcaaagtactttaaatcaataattaagtgaagcaaaaaagaccagtttactggtctttttgttttagtagataattttgttaatctgttgaagcttttgtgtaaaagtggttggtgcaattgcttgattaggattatagggcaaaagcacgagattagtgtactgactgacccgtggtaaggactgataatctctgaaatcgtcttgactaaagaagccatagaacaagatatcttttgccttaacccaacctagtttggtataaatccacatgtttttaggactaccattaaaattttgaatttttaataattgatttgcgggtaatttttgctgcgttttggcttggttatcaggataacgataaattgtaactttttggttaggtttagcgataattttcttattttgataaggagcaatatctcgctttgttaagtcaaaattaacgaattctgccgaaataaaagttttttcagcaatttgataaaataagcgatcatctacacggacgccataagtgacattgactttttgacctggttgcacgtacttcttttctttgatgcgaacatacggattcatcattgtagcggctttagttttaccaaaataaattccagttctattaatagcgtactttttagtgccacttttggctaatttatatttaaaaccagtagcgggatagttggtaaccacgccatcaacattccgattaattagccaatgccatagggcaggcgattcgtccatttcggcccagacaaacagttgcttatgtaatttgtgaagccagtgaattaaaaagggatgctcttgcacaatgtcagaagaagcattgatagcattaacttgaggtaaattactgaaattaatgcgtttcaggctaccaacgatcaaaattagataagcttcaggcataatttttctaaagtgaaagagactagcagcggaaaatgaatgaatcatgattcttttctgcatatggtattttttaactatttgtgcgattttatcctctaactcataggacggatttaatccatgatcaattttagtctctaagacaaatttagtgtttggtttattttgataatgcttaaaaagctcactgagtgacataacgtgttcgccattgtcatattgcagttgtttaagtgctgtaaaattattttgtgatacaattgcatgtgtatgagtaactcggaagaggtcatcatcatgtgcaatgaccggaactccatcctttgagagctggagatcgagttcaacgtaatcagcaccagaattaaaggcggaatcgtcagcctgaattgtttcttcaggatatttgatgggatcaccacggtgccctacaactgtaaaaccactatttatgaaaaagactaagctaaaaaaaagaacccaaacgagtcggcttttaaatttcatgtgtacacctctatcgcatacttaacaatagcatggttacacatttttttctatttatagtactattcttttatcagtaatcggtatgattgaaatctaaaggatgagatttaatggaacaattggacttaattgaagaagttaccagaaatgatggcagtcgatattatgaaatctctaatattgaccaaaatggaattgcagaattagctgcagatcatggcttaattaaaaaagtcaaaatactgcagctgaatattcctcgaactaaggcactgattgcttatgaaaaatatatcaatgatacttatgacttgcagactttgactaatgaaagtgattggaaaaatccaaaatgggtagaatgggataaacctaagggaaaaattttagacgcatataatatgatcttaaaagccaatcgaattggttagaaagtggcataaaaaatggaacaactgcgaattttacataccaatgatcttcattcacattttgaacatttccctaaaatcggacgttacttgaaaaaagcgcaggctgatcaatcggttgatggtatctacacttttgatgcaggagactttatggatcggtctcatcctttaactgatgctacggaaggtcaagccaacatcaaattgatgaatgggtttaactatgatgcaattacgattggcaataatgagggaatttctaatccacattgggtattggaacatttatttgatcatgcggactttccgacagttttagcaaatttgcgtgaagaagatgaatcaatgcctaaatgggcagtcggccatatgtttttaactactaagaaaaagacgcgaattgctttaattggcctgactgcagcttatccaatgacttatggtcctaatcattggcatgtcaagatgttaggtgacagtatggatcacgaattagctcaaattgaaggaaagtatgatgtcttaattttattgactcatgttggattaaaaatggatcgctggttagctaaacattatcctcaaattaatttaattgtaggaggccacagccatgatctgattgaacatggtgaaaaagtggggcatacttggattacgcaaacaggtaaatggggaaactatgtgggtgatattcatctagaacttgaagatcatcacgtgattaaggtagtacctcgcactatttctactgcttcgatgccagaagaaccggaagataaggcagtgattcagggctactatgatgaaggtaagcgacttttatcagaacgaaaagtggctaatttacctgaaaaatttgcggatgataaagtagcagccgttcaagtttctcttgatgcgattgctgattttgctaaaacagatttagccattttaagctcaggcctattcttgcccccgtttaagagtggaataattactcaatatgatttacaaaatgccttaccgcatccaatgcacgttgttcgttcaaccttgaaaggttatgatttgtggcgactagtgatggaaattgaaaagaatcggcattacctagaccattttccactgcaagggatgagttttcgaggaaaaatttttggtcagatgtattacaaagggatcaaggttgatatgcgtagacgtgtagtttacgtcaatgggcatgaaattgatccacaaaaagaatataaaattgcctgtttggatcattatgtcttagttccattttttccaactttggctattgtcggtgaaaatgagtttttattcccacaatttttacgtgaagttgttggtaaatatttggctgaaaaatatcctttaacagcgagaagtgaaaaagatgactgaagaaaataaatttgaacaagaacagccaattagacacccacttgctgacgtggtgcaagatggtaagagcattaagattggtgcgcagctttatagcatcattgtcaatgagcgagacgcacttgatttagaatctttgcgtaaaaaatatgatccttatcttgaccagtatgattatctggtgggggacgtttctagtgaacatttacgcttgaaaggcttttataaagacggtgctagaaccgcaattgataaaaaagaaatggcgatcgtggattatttaacggaatattgtaatcccggcggaccttattttatcttggaattaacgcatccagtacattattatcagcatcaacgtactaaaatacggcgatcacgtgaacgacgcgagcgcgattttggtaaaaatgagcgttatcatgcacgacgtcgaaattatcggaagaataaaaatgaaaataatccgtttaagaagcggcgtgttcatcaaactaaatttaagaaaaaaacaatcaattgcagtgaaaaaagaatttggacggcatcattcatttattattaaaaagagaaagggaaactagtgaaagattaccgggtatttttaattgacttagacggaactgtttatcgtggtaaggaaacagttgaatcaggagtaagatttgttcatcgtttggttcaagcagggaaagactatttgtttttaaccaacaatacgaccagaacaccgcaaatggtagttgataaactaaagggacacggtatcgaaactgatacggaccatgtttatacgccaagtatggccacagctagctatattttacaaagagaacacaaggaaaagatcggcttgtatattattgggcagattggtctctggcatgaattattgcaacatccagagtttgagcttaatgaagaaaatcccgattatgtaattgtcggtatggatacagatctgacttatcataaagtacgagtagcttcacgggcgattagacgtggagccacttttattgggactaatgccgatatgaatttaccagcagaggatgagctaattccaggcaatggttcacaatgtgcattcgttgctgcagcaagtggagtagagccactgtatattggtaagcctgaatcaattattgtaaaaatggctttggataaagttggctatagcaaagatgaggcacttttggtaggtgataattacgataccgatattaaagctggctttaatagtggagtagatcagttgttgactttgacaggtgtgacgaccaaagtggatattgcagataaacgtcaaccaacaattttagttaataacctagatgaatttgaattatgattactaaaaacaatattttttcgctgatttatcattttttgtttgctgtttctagcagtgtaattggggcaattgtggctagttggccattattgtttatttttatgatcgtacaaaagacatatgagacggttcacatgtctttgtttaaggtaatgcataattataaccagctgatgttttatttgctctggccctttaaaaagcagcttaaaatggataatttccctacatctgctaatgcggcagaacattttgcggaatgtaagcatttatttattctgactctattagtttttattatctgcatcatagtgcactttgtttttaaacgacaaaagaaaaagctactgcttaatttggataaatcagtagcccttattttgctattattgccaattattatttttccatttgcagtaaccaatttcgacagtttctttgtgatttttcaccatattttgtttaacaatagtgattggctgtttgatcctaatactgacccaattatcaatgtgctaacggaaggcttctttgcttcttgttttgccgttgctggggttatttatgaattatattttgctgaaaaattattacgtaagtaaaaaagagttccttagtggaactcttttttgagtgatatttttttcttgattgcgacaattgcgattggcacaactgatactaaaatgatagcaattacgattattgaaaaatggtcctttacaaatggaatattgccaaagaagaaaccgatgattgtgaacaatcctgtccaaagcaagccacccaagatgttgtaggtgataaatttaccataatgcatcttactgccgccggaaatgaatgggacaaaagtacgaataaatggtataaatctacctataacgatcgtaattggtccgtggcgctcaaagaacttttcagcggccaaccgattattttgattaattaatttattgaaccagctatgtttttcaccagctctggttgaccaggcaccaatttcatagttgatactgtcaccgattatggcggcgaatgctactataagataaactagccaaatatttaagccatacttaggattagcagccattgcactcgcagcaaaaatcaacgaatcgcctggaagaaatggaaaaacgactaagcctgtttcaataaaaatgatagcgaataagattaaataggaccaaccaccgaattggttaacaatcgggattaaatggtcatcaatgtgcaaaataaaatcgattaaactcatctggaactcctaaaaactagttgaatgaattgtcaaagttttttcagggaaaagatcacgcataatcgcggtgattgcaatctgggcttcgccaaaaccgagagcgattaaagggacgcgtccaagataggtaacaacatcgccagctgcataaacaccggcgatattagtttgcattgttgaattcaccttaatttgtgcgccagctaaatcgattccccattttttgacaaagcgattattagctttaaagccatatgcaacgactgcttggtctaacttgatattagttaagctatcttttcccatttcttttaaattaacgttcagttgattatcaaccaaattgatttgtttaggaagataaggagttaaaatttcaacattttttaaagacttaagttttttgacattagattcaagaccgcgaaattgattacggcgatgaatgattttgacattggcataattagctaattctagtgccaggtctaatgctgaatcgccgccaccaaagacgccaactgtttgtccgacaaattttgggggatctttaataaagtaatgaatccttttttgagtatcatcatccatagataatggtaaagctttaggtttaaaggcaccggcaccagtggtaatcaatatgctgcgggatgcaactatatcatcgataataaagccgtctttttgtttagtgacattttcaactttatggttagtaaaaatagttgtatccgttaaattatgtcgtaaattgtcgattagttcagttcctgtaatagagtcgtaagcaggaatatctttgattttcttaaaaggataaagcatttgtggctgtccgcctgtttcagataatgaatcaaacagtacggtcttgagtccatgaagatgggcaaatcgcgcggcaaataggccaacaggtccgccaccgataatagttaaatcaaattttttaattttaatgacctcctcaaagtagtgatgtatcaactttaacatgaattttgtaaatattcatttaaaaataagcttgtcaaaaaatgaattttaaggtatattattgaagtcgcctttttaagagcgagcataattctttattgaaaaaatacttgcaattaatattcaagtattatacattaataaagtcgcttcgagagatgcgacgagagcttaaaaacagacatgcaaggaaagaaaacaaataaaaagaaaaaagtacttgcaaagaagtaaataagctggtaatatatttaaatgtcgtcaggtgaaagcagaaaaagcttgagcaagacaaaaaaacaaatcaaaaaagttcttgacaaagaaatgatggtttgataaaatatgaaagctgtatgctttgcaaaaaagcaagacagaggtagtactttgaaaactgaacaaagtttcgctaaaagtgtgcgggtgtaaaaacccaaacaagaagcgaagtcaattcgcaagcaataaatttgagacaaagatcttaaataaggaatgagcaatcattcaaactttttaaaatgagagtttgatcctggctcaggacgaacgctggcggcgtgcctaatacatgcaagtcgagcgagcgaaactaacagatttacttcggtaatgacgttaggaaagcgagcggcggatgggtgagtaacacgtggggaacctgccccatagtctgggataccacttggaaacaggtgctaataccggataagaaagcagatcgcatgatcagcttttaaaaggcggcgtaagctgtcgctatgggatggccccgcggtgcattagctagttggtaaggtaaaggcttaccaaggcgatgatgcatagccgagttgagagactgatcggccacattgggactgagacacggcccaaactcctacgggaggcagcagtagggaatcttccacaatggacgcaagtctgatggagcaacgccgcgtgagtgaagaaggttttcggatcgtaaagctctgttgttggtgaagaaggatagaggtagtaactggcctttatttgacggtaatcaaccagaaagtcacggctaactacgtgccagcagccgcggtaatacgtaggtggcaagcgttgtccggatttattgggcgtaaagcgagcgcaggcggaagaataagtctgatgtgaaagccctcggcttaaccgaggaactgcatcggaaactgtttttcttgagtgcagaagaggagagtggaactccatgtgtagcggtggaatgcgtagatatatggaagaacaccagtggcgaaggcggctctctggtctgcaactgacgctgaggctcgaaagcatgggtagcgaacaggattagataccctggtagtccatgccgtaaacgatgagtgctaagtgttgggaggtttccgcctctcagtgctgcagctaacgcattaagcactccgcctggggagtacgaccgcaaggttgaaactcaaaggaattgacgggggcccgcacaagcggtggagcatgtggtttaattcgaagcaacgcgaagaaccttaccaggtcttgacatctagtgccatttgtagagatacaaagttcccttcggggacgctaagacaggtggtgcatggctgtcgtcagctcgtgtcgtgagatgttgggttaagtcccgcaacgagcgcaacccttgttattagttgccagcattaagttgggcactctaatgagactgccggtgacaaaccggaggaaggtggggatgacgtcaagtcatcatgccccttatgacctgggctacacacgtgctacaatgggcagtacaacgagaagcgagcctgcgaaggcaagcgaatctctgaaagctgttctcagttcggactgcagtctgcaactcgactgcacgaagctggaatcgctagtaatcgcggatcagcacgccgcggtgaatacgttcccgggccttgtacacaccgcccgtcacaccatgggagtctgcaatgcccaaagccggtggcctaaccttcgggaaggagccgtctaaggcagggcagatgactggggtgaagtcgtaacaaggtagccgtaggagaacctgcggctggatcacctcctttctaaggaagcgaaggatatggagagcaggaatgctaagagaagtatccagagcaagcggaagcacactgagaaactttgtttagttttgagggtagtacctcaaagatttgaaaaacgccaagcgttagtcgggcctatagctcagctggtttagagcgcacgcctgataagcgtgaggtcgatggttcaagtccatttaggcccattgacataacgaagaaaaagagttaaagttatgtctggccgaaaataaaatactctgggggcttagctcagttgggagagcacctgctttgcacgcaggaggtcatcggttcgaacccgttagcctccattgatccagaaaaaggatcaaagagctagtacattgaaaactgaatataatccaagcaaaaaaccgagacaatcaaagagaacagattgtagagcgaccgagaagagaattcttgagtaaggtcaagtagaaaagggcgcacggtgaatgcctaggcactaacagccgaagaaggacgtgacgaactacgaaaagcttcggggagcggtaagtacgcagtgatccggagatatccgaatgggggaacccaatgcagagatgcattattgattagtgaatagatagctaatcaaaggaagacgcagtgaactgaaacatctaagtagctgcaggaagagaaagaaagatcgatttccttagtagcggcgagcgaagaggaaagagcccaaaccaagtgatttatcatttggggttgtaggactgcgacgtggcagtgtaagagatagttgaattatctgggaaggtaagccagagagggtgagagccccgtaagcgaaatctcaagcacgcctagcagaatcctgagtaggccgggacacgaggaatcccggttgaaaccgcgaggaccatctcgcaaggctaaatactagttagtgaccgatagtgaaccagtaccgtgagggaaaggtgaaaagaaccccggaaggggagtgaaaaagaacctgaaaccgtgtgtctacaagtagtcaaagcacattaaagtgcaatggcgtgccttttgtagaatgaaccggcgagttacgttatctagcgaggttaagtcagaaaagacggagccggagcgaaagcgagtcttaatagggcgaaaagttaggtgacgtagacccgaaaccaagtgacctacccatgaccaggctgaaggtgtggtaaaacgcactggagggccgaacccacgtaagttaaaaattgcggggatgagttgtgggtagcggtgaaattccaaacgaacttggagatagctggttctctccgaaatagctttagggctagcctcgtggagaggataatggaggtagagctctgtttggactaggggcccgtcaggggttactgaatccagataaactacgaattccagatatccatacacgggagtcagactgcgagtgataagatccgtagtcgaaagggaaacagcccagatcaccagttaaggtccccaaatctatgctaagtggaaaaggatgtggagttgcgtagacaactaggacgttggctcagaagcagccatcattcaaagagtgcgtaatagctcactagtcgagtggcgctgcgccgaaaatttaccggggctaagcatagtaccgaaactgtggatgtgttttaaagagcacgtggtaggagagcgttctaagagcggagaagttgaatcgagaggatcaatggagcgcttagaagtgagaatgccggtatgagtagcgaaagataggtgagaatcctatccgccgaaagactaaggtttcctggggcaggctcgtccgcccagggtaagtcgggacctaaggcaaggccgagaggcgtagtcgatggataacaggtagagattcctgtactgtgtcaaatcgttaagagcgaaggagggacgcaggaggtgaagcacgcatcgcgatggaacgatgttcaagcaacaagtgcggttaagagtcaaatgcttctaaccagcaacacgagttgtgaagaggagtgaattaaaagtagcgaaggtgtggtaatcacactgccaagaaaagcttctagccagagatgacatacccgtaccgcaaaccgacacaggtagtcgagtggagaacactaaggtgagcgagagaactctcgttaaggaactcggcaaaatgaccccgtaacttcggaagaaggggtgctagccaagagattggttagccgcagtgaataggcccaaacaactgtttatcaaaaacacaggtctctgcaaaatcgtaagatgacgtatagaggctgacacctgcccggtgctggaaggttaagaggagagcttagcgtaagcgaaggtttgaattgaagccccagtaaacggcggccgtaactataacggtcctaaggtagcgaaattccttgtcgggtaagttccgacctgcacgaaaggtgtaatgatttgggcactgtctcaacgagagactcggtgaaattataatacccgtgaagatgcgggttacccgcgacaggacggaaagaccccatggagcttcactgtagcttgatattgagtatcttttaaacatgtacaggataggtaggagccagagaagataggacgctagtcttattggaggcaatgttgggatactacccttgtttgaaggatgctctaacctcgacctgtaagccaggccagggacagtgtcaggtgggcagtttgactggggcggtcgcctcctaaagtgtaacggaggcgctcaaaggttccctcagaatggttggaaatcattcgcagagtgtaaaggtataagggagcttgactgcgagagagacaactcgagcaggtaggaaactaggacttagtgatctggtggtaccgtatggaagggccatcactcaacggataaaagctaccctggggataacaggcttatctcccccaagagttcacatcgacggggaggtttggcacctcgatgtcggctcgtcgcatcctggggctgaagtcggtcccaagggttgggctgttcgcccattaaagcggcacgcgagctgggttcagaacgtcgtgagacagttcggtccctatccgtcgtgggcgtaggaaatttgagaggagctgtccttagtacgagaggaccgggatggacgcaccgctggtgtaccagttgttccgccaggagcatcgctgggtagctatgtgcggaagggataagcgctgaaagcatctaagtgcgaagcccccctcaagatgagatttcctttgcgtaagcagtaagacacctcagagacgatgaggtagataggctgggagtggaagtcctgtgaaggatggagcggaccagtactaatcagtcgaggacttgaccaaagcgaagcaaactggaaggttttttgcgagaaggattatgtttagttttgagtgtaaaagctcaaaagagtacggtggcgaaagcaagaaggatacacctgttcccatgccgaacacagaagttaagcttcttaacgccgaaagtagttggtgggcaactgcctgcgaggaaaggaagctgccgtgctcaatatggaggattagctcagctgggagagcatctgccttacaagcaggaggtcacaggttcgagccctgtatcctccatatcgagtcgttagctcagttggtagagcaacggacttttaatccgtgggtcgagggttcaagtccctcacggctcatgaccctatatatgcgggtgtggcggaattggcagacgcgctagatttaggttctagtgttttcggacgtgtgggttcaagtcccaccacccgtattgccaaccacatattgacaatatgccgatttagctcagttggtagagcatctgtcttgtaaacagggggtcgtacgttcaagtcgtataatcggcatttatattacgcggaagtagttcagtggtagaacatcaccttgccatggtgggggtcgcgggttcgaatcccgtcttccgctttcatcaacacgccggagtggcggaattggtagacgcacgggacttaaaatcccgcggttggtttcaaccgtatcggttcgactccgatccccggcattgatgatgcgcccttagcgcaactggatagagtgtctgactacgaatcagaaggttgaaggttcaaatccttcagggcgcatataacgggaaatggctcagtttggtagagcacctggtttgggaccagggggtcgcaggttcgaatcctgttttcccgattgtaatctaatggtgattggttacattttggcggtgtagctcagctggctagagcgtccggttcatacccgggaggtcgagggttcgatcccccccgccgctataattgtaagcttggacctttagctcagttggttagagcagacggctcataaccgtcctgtcgtaggttcgagtcctacaaggtccataatatggcttttatattaatatcgcgggatggagcagtctggtagctcgtcgggctcataacccgaaggtcgttggttcaaatccagctcccgcaatttggtccattggagcagtggtttatctcgcctccctgtcacggaggagatcatgggttcaaatcccatatggaccgtaagatggctcggtagctcagtcggtagagcaaaggattgaagctccttgtgtcggcggttcgattccgtcccgcgccatttcattttatattaggtgcgggtatagtttagtggtaaaacgaaagccttccaagctttagtcgcgagtccgattctcgttacccgctttatatgggcctatagctcagctggtttagagcgcacgcctgataagcgtgaggtcgatggttcaagtccatttaggcccattggagacatactcaagtggctgaagaggcgcccctgctaagggtgtagatcgggttattccggtgcgagggttcgaatctctctgtctccgctatatagaaaagtaactgttctagattaatttctagagcagtttttttgtgtaccgagcggcattcttagtccgatgaaagtgttagaactaagagccagtagcaatgatattatgagtatgggacgtttacaaaggagtaaatacctgctgaaacagtaaggaattacaaatgtatcgtcttatatgcaaccatatgtatagtggatggaaggagatgagttcgttaagttctctctgcattgaaaacacgtcataagatgttaaaaccttaattttgagttattgataaacctaaatgcatattattttgaatgacttaatggaaattattacacttcttttaggtaaaagtcttggacattgattcaagtcaataatcgtgtatataacatagggagagccgattgttttaaatttcttcttgtatgatctatattaaaaaaataattttgtgggggatttcatagtgatataaagaagcagtttaatatggaacaatttataaagatcatttagttaaagataagagaagctgttttgctctagctaatttgaagtattaagatagatataaatgttttacaacaaaaaaataaaaaagtacttgcattttgactgaatatctattaatattaaatacgttgtgattgagagatcacaatagtaatagctaattaaaaaaataaataaaaagttcttgacttttgaaatgtgattagttattataataaagtgctcttgagtgagttacatgacccgttggtcaagtggttaagacacggccctttcacggccgtaacatgggttcaaatcccgtacgggtcattgccacaatttatttttttggcattaagcaatggaggattacccaagtggcttaaggggacggttttgaaaaccgttaggcggttctgccgcgcgtgggttcaaatcccacatcctccttagttgaatatcgcgggatggagcagtctggtagctcgtcgggctcataacccgaaggtcgttggttcaaatccagctcccgcaatttggtccattggagcagtggtttatctcgcctccctgtcacggaggagatcatgggttcaaatcccatatggaccgtaagatggctcggtagctcagttggtagagcaaaggattgaagctccttgtgtcggcggttcgattccgtcccgcgccatcatctggaggagtagcgaagtggctaaacgcggcggtctgtaaaaccgctctctctgagttcggcggttcgaatccaccctcctccataatagggatatcgtataaaggtagtacatcggtctccaaaaccgctagtgtgggttcaattcctactatccctgtttaccttcatggcggaattggtgaaggggttaacacactggtttgtggatccagcatgcgtgggttcgattcccacattccgccctagtattgggatatagccaagtggtaaggcattagactttgactctaacatgcgctggttcgaatccagctatcccaattctaaataatttcataacttatggcggtgtagccaagtggtaaggcagaggtctgcaaaaccttaatcgtcggttcaaatccgacctccgccttatcaaccgaataagttgattattttaaaatttaatattatggcggtgtggcggaattggcagacgcgtcagactcaaaatctggtgtccattacggacgtatcggttcgaccccgatcaccgctattattatgaagcgatccaattattggatcgctttttttttattttaaaatgttagcattttattatataaattgcacatgaatacaggaatctttataatgctacatatggaggtactcaaatgaatattggtctttataccgatacatattttccccagataagtggcgtagctacttcaattaaaacgttaaaagaagcgttggaaaagcaggggcataatgtatttatttttactactactgatccgaacgtgaaaaaaggaactgtagaaccgaatgtatttcgttttagcagtattccttttgtctcatttaccgatcggcgaatagcatttagaggactatttgaagcaaccaaagtagctaaagaagtcaatcttgatatagttcatactcaaactgaatttgcattaggtactattggcaaatatgtagctcatcaattagatattcctgctatccacacttaccatacgatgtatgaagattacttgcactatattttaaatgggcatttgcttcgtccatatcatgttagacaatttgttaaaagctatttgaaaaatatggatggatgtattgctcctagtggccgagttgaagaattattacggcgctatggcgttcaaataccaattagggtgattcctactggagtagatttgcagggcatgaacaacgatattcaacgtgatgtgcggcaagaacttggaattgatcaagatgcgcctgtaattttaaccttaagtagaattgcagccgaaaaaaagattaatcatattttgaacgtaatgcctgaaattattgatgaatttcctaatgtgaaatttgttatcgcaggtgatggccctgatgttgatgtgttaaaggatcaggtagagcgattaacactagagaattacgttatttttgtcggtaatgtagagcatggcgatgttggtaattattatcgaatggctgatctttttgtttcagctagtgatacagaaacacaggggttgacttatattgaggctctagctgcaggtacgccatgtgtggtttatgacacagactataccgaaaacatttttgatcaagatatttttgggcagacatttactacacaacaagaaatgttagaagagattattactttgcttaagcaagggacgaaaagaatcccgcaggaacttttgcaaaataaattacagaagatttcagctgatcaatttgctaaaaatgtgtctgatttttatcagtatgcaattgatcactatcaacctaagcatgatgaggagactaaaaagaggaactaaatgattagaattaatatgttctcgcaagctgattctgttaaaggacagggtgtaggttcagcttataatgaattgattaaacttctgaggacgcacttagtagacgaattttatgtaacgattaacaaatatggcaatagcgatttaacgcattatcacacgattaatccaacctattacgcaaatagttttttaccagcacgtggcaggaagattggctatgttcactttttaccagatacattagaaggctcaattaagttgccaggcgtagctaaaaaagttttttatcaatatgtaattgatttttataaacgcatggatcaaattgttgtagttaatccaatctttattgataagttggttaactatggaattgatcggaacaaggttagatatattcctaattttgtttcaaaaacagaattttatgaagaatcattggccagcaaaaacgcatttcgtcatgaattaggaattccacttgataaatttgttgtttttggtgatggtcaagtacaggaacgcaaggggatcgatgactttgttaagatggcacaagctaatcctgatattcaatttatctgggcaggcggtttttcgtttggcaaaattactgatggctatgatcattacaaagaaatggttgacaatccacttaagaatatgacgtttgcgggaattgtagagcgagagaagttagttaagtatttaaatattgcagacttatttgttcttccatcatatgatgaattgttcccaatgtcagttttggaagcattcagttgtggaacaccagtattattgcgtgaccttgatctttataaggcaattatcgatggctattatctaagcggaaaagattttggcgaaatgaatcaagtattgcaaaaagtagttgccaatccacaaactttgcagaaatacagcgaattatcgcgtaaggcaagtcaacagtattcagaagatcatttagctaaaatttgggacgaattttatcatgagcaatatgaattaggaaaagagctaggtcaaatacattaatgaataaaaaacatttgtggggcattctggttgttttagcaatcagtgcctttgtgctatatgcagatttaaaagctacaccgatatcggaaatattacgggcagctcatggcctgaatatttttggattaatcatggtttttgctttaatgcttttgtcctatgtatgtgaagccggtatcttagctactttagctcatcgaaagaaagagcctaaaaggtcagcttggtcgtttttgcgaattccaattattcaagctctatttaatgcaattacaccaatgtccacgggtggacaaccatcacagctagccgcaatgattcaaatgggcatggaaggtggccgttccacctcaattttgctgatgaaatttattatttatcagatcgttgttttgtttgcctatgtatttacaattatttttggctttcatatggtaatgactaagttcgctggtttagcaatttttattgcaattggctttttgattcatgttagttcaattatctttttgcttgcaattatgtttgcttatcgttttactaaaaaggcaactaattggttaatggacttgttggcaaaaatgatgaaaaaggaacgagttgagaagtggcgtaaggctactttagaaaagattgatactttttatgcagagagtcagaaactaaaaaaagaaaagaagaaattatttgttgcctcgcttttaacagtattgcagctacttttcttttactccgttccatttatggtattaacagcgctaaatgtaccttgttcttggtatcaagttacgcaaatgaatataatgattatcatgtttatggcgatcattcctattccaggtgcgtcaggaggggcagaatatagtttccaaacgttattctccaccttcatttcttcacatggtgcgttaattttggctatgtttatttggcgcttttcaacatattttttcggtatgcttctcggcatcttaggctggatttttaagccgaaaaagataaaaagcacaaaaatgattaatttttattaaaacaacggtgtcttactaaatttcgtagtaagataaattaccgtaatgagaggagcagaagcgcgtggaacacactaaatctttttttaggtggctgacacagactaagttaggcttttttacgattgttttagtcttgttttggcttaaaacttattttatctatttaactaagtttaatttaggagcagttggtccaatgcagcaatttttattgctgattaatccgattccttcagggatgcttttgctgggaattgggctattttttaaaggacgtaaatcctattggattattttagttatcgattttttgctaacactgtggttatttgccaatattttatattatcgcgaattttcaaactttttgtcattttcaattattaagacatcaggctcgacttccgataatttgggtaaaagtattgcaggaattacactagctagcgattttttagcttttgctgatattgctgtaattatcgtgttattggcgaccaaagtaattaagatggatgttcgtccactgaagctaaaagttaatttgttaattgaggctttggctgtcagcttaatgggactgaatttattgatggcccaaaatgatcgttctggacttttgacgagaacttttgataataattacatcgtcaaatatctgggaatcaatgaatacgctatttatgatggctataagacagcacaaactagtgcacagatggccaaagctaatgtttctgatttgaagtctgttagaaactatttaaaagaaaattacgttaaacctaatcccgcttacaccggcgtggctaaaggaaaaaatgtgttaatcatccatttggaaagttttcaacaatttctgattggctacaaatggaaaggtaaagaggtaacgccaaatctgaataagatttatcatcaaaaagagaccattagttttgataatttctttaatcaagtaggacaaggcaagacttctgatgccgaaatgatgcttgaaaattctttatacggactacaatcaggtagtgcaatgtctacgtatggtacttctaatacttttgaaagtgctccagccattttgcatcaacaagctggttatactactgctgtaatgcatggtggtgctggctccttctggaatagaaataatgcttataagtcatttggctaccaatactttatgccactgtctttctatcagaacaaaccaagctactatatcggatatggcttaaaagataaaattttctttgatcagtcaatcaagtacattgagcgtttaccacaaccattttatttaaagatgattactgtaacgaaccactatccgtataatatcgataaaaagaatcagacgattgataaaacgaatactggggatgaaacagttgatggttatgtgcagaccgcgcattatttagaccaagcaattggtgaatttatgcgttggatgaagaagacgggcctagataagaagacactagtagtattttatggtgatcactatgggatttcaggtaatcaccataaggctagtgcagaattgcttaagaaagattcgtttaatgactttgataatttgcagttccagcgagttcctttgatgttccatatgaaaggactaaagggtggcattaatcacacctacggcggtgaaatcgatgttttaccaaccttactgaacttgctggggatcaaagacaaagatacgatccaatttggctatgacttgctaagcaaaaatgcaccgcaaattgtagcacaaagaaatggtgactttatcactccggaatattctaaggtgggtagcgattattatgacaccaagacgggcgaaaggatcaaacctaataagaaattaaaagaaaaattaactgcaatttctaacaccgtaactacacagctgtctttgtcagatcgtgtaattaatggcaatctgctccgattctataaaccaaaagggtttactagagtcaagccgaaggattacgactataacaaggcgccatctttaaaacgtttgtttgatgatccaagcaaaacttcactgtggtatcaaaatcatcgtaaaacgacgcaaaaagatttcaagacagatgcgcctgaactaaaaaaataactgcaaaaactagtaatttgtgataaacttggtaagtaaatcgtatgtgtgtattggaggcagcgcattgtataatttagttatgacgctactaatcattgtttcaatcttaattgtcattgcaacaatgatgcagccacaaaaacaacaagatgcattgaacgccttatctggcggtgccgtttttagtgggcaaaccaaaaaacgtggttttgaagcatttatggaaaaagtaacctcagttttattggtactctttttcgtctttgctattatcttagcttatatgtcttcaaaataaattttgtacctcccgatcaaaatatgatggggaggctttttttattaaatttaaagatcggagaataactgcatggcacaaaacgaaaaaattttggccggcgttttagaaatttttcgccataatccacaaaaacaatttcgtgtagatcaaattgaacgtgaagcacgtcgtgatagattaggtaattttactgaattaattaaggctctttcttttttagagcacgataaaaagattattacagatggcaaaggacaataccaattagctcaagaaaatactgaagttgaaggtgaatttagagctaatgataaaggctttggctttgttagattagatgatgaaaatgcggacgacgtctttgttgccgcagattataccaagtatgccgttaatggtgaccgagtaaaagtaaagatcactgctggtggtaatccttggaatggtaagggaccagaaggtcaagttgaagagatccttgaacatggtttggaaacgttagttggtgaatttcatccgctaactgatgaacaaagaaaaaacagtcattttatcggctatgctttgagtaacgataaaaagttgcataaataccgggtttatttgtctgaaaatggcttgatccctcaaatgggcgatatggttaaggtctcaattaaggattatccagatgaggaaaatcctgagtcaatgactggtgcagtagtcaacattattggtaataaaaatgaccctggcgttgacattatgtcaattgtggcagcacatgatgtaagaactgaatggcctgaagatgcaatggcgcaagctaatgctattcctgatcatgttactgaagaggaaaaaaagggtagagtagatattactgaccaacctgcagtcactatcgatggggatgattctaaggactttgacgatgctgtagttttatggaaaaagcctaacggcaattatcaccttggtgttcacattgcggacgtttctcactatgtgacagaaaatacgccgttgaacgaagaggcatttgctcgtggcaacagtacttacttagttgatcgggtaattccaatgctgccatttagactttctaatggaatttgttccttaaatgaaggcgtggaccggcttgttttgtcatgtgacatggaaattacgccagaaggtaaaagagtaggttataaaatttatccttctgttatgcgctcacatggtcgaatgacctacaacaaggttaacaaaactcttaagggcgaaatgaatggtttagaggataagtatgttaaactccgaccaatgcttgaagaaatggcagatttgcatgctgctttgtataaacaacgtcatcaacgtggtgctattgactttgaagaaccagaagcaaaaattattgttgatgatcaaggcaagccaacagatattgttttgcatgaacgtggtactgccgaaaagatgatcgaatcatttatgttaatggctaatgaaaccgtggccgaagatttcttcaaaaagcatgttccattcttgtaccgtgttcacgaaacaccagatgccgaaagaatcaagactttctttgaattttgtagcgcatttggcttgaatattcatgcggatccaaataacgttaagccaattgatttacaaaaagtagtttctaaaactacagatactccagaggaagctgtagtacaaatgatgatgctacgtagcttaaagcaagcgcattattcagaagaagcactgggacactttggcttagctgcagaatactatactcactttacttcaccaattagacgttattctgacttgatggtgcaccggatgatccatgcatatcaagaccaggggactaatgaagaagtgcaaaagcattttgctagttacttgccagatgttgcagaacaaacttcaacgcaagaaagacgttcaattgatactgaacgtgaagtaaatgacttgaagatgacagaatatatggccgatcaagtggggcaacactttgacgcggtagtatcttcggtaactagttttgggatgtttattcaattaccaaatacgattgagggattaatccatatttcgaatttgactgatgatttttacagttttaatgaaaaagcattgacgctaactggtcgaggtactcataagcaatataaggtagggatgccaattaaggtaaccttgattaatgctaacgttgaacaacatcagttagactttgaaatatatgatcctaatgcgcctaagcataagcataacgatcgcggaatgaataatcgtcgtcgtggaaaccgtggcttccgcaataatcatggacgccgtggtggtcagtttaataatcacagcgatcatggccgtggccgaggtaatggaaaccgtggaggtcggagaaattttaaacattagggattgatcttaatgaaaaaagaaaaagaagataatttaattgcacaaaataaaaaagcacgacacgactattttattaaggaaacattggaagcaggaattgctttaactggaaccgaaattaagtctgtacgagctagaagaatcaacttgcgggatggttatgtgcagatcgtcaacggacaagcctggctagaaaatgttcatattagtgaatataagcaaggcaatcggtacaatcatgagccactacgtagtcggcgccttcttttgcataaaaaagaaattgcacgtttggccaaagcacaatcagagcgtggtattgcaattattccacttaaagtgtatttaaaacatggctttgccaaggtattgattggtgttggccaaggtaaaaaggaatatgacaaacggcaaacaattaaagaaagagaccagaagcgcgatattcgacgcaagtatggtgtctaagatgagtctgagaagaatctcagactttttttgttgaaaaattttaaaaagtttttttattttcacaaagtaatgttcgaacaatttgaagaatgcagagaaaatcaagctaaatatttttttaattattatagaggcgaataatagtattaagatacgtttgatattgaaatattcatattaaaaatccgaacgaagagcaagacttgccaaagcggagaaaataaggtaaattaataaagtcgcttcgagagatgcgacgagagcttaaaaacagacatgcaaggaaagaaaacaaataaaaagaaaaaaagtacttgcaaagaagtaaataagctggtaatatatttaaatgtcgtcaggtgaaagcagaaaaagcttgagtaagacgaaaaaacaaatcaaaaaagttcttgacaaagaaatgatggtttgataaaatatgaaagctgtctgctttgcaaaaaagcaagacagaggtagtactttgaaaactgaacaaagtttcgctaaaagtgtgcgggtgtaaaaacccaaacaagaagcgaagtcaattcgcgagcaataaatttgagacaaagatcttaaataaggaatgagcaatcattcaaactttttaaaatgagagtttgatcctggctcaggacgaacgctggcggcgtgcctaatacatgcaagtcgagcgagcgaaactaacagatttacttcggtaatgacgttaggaaagcgagcggcggatgggtgagtaacacgtggggaacctgccccatagtctgggataccacttggaaacaggtgctaataccggataagaaagcagatcgcatgatcagcttttaaaaggcggcgtaagctgtcgctatgggatggccccgcggtgcattagctagttggtaaggtaaaggcttaccaaggcgatgatgcatagccgagttgagagactgatcggccacattgggactgagacacggcccaaactcctacgggaggcagcagtagggaatcttccacaatggacgcaagtctgatggagcaacgccgcgtgagtgaagaaggttttcggatcgtaaagctctgttgttggtgaagaaggatagaggtagtaactggcctttatttgacggtaatcaaccagaaagtcacggctaactacgtgccagcagccgcggtaatacgtaggtggcaagcgttgtccggatttattgggcgtaaagcgagcgcaggcggaagaataagtctgatgtgaaagccctcggcttaaccgaggaactgcatcggaaactgtttttcttgagtgcagaagaggagagtggaactccatgtgtagcggtggaatgcgtagatatatggaagaacaccagtggcgaaggcggctctctggtctgcaactgacgctgaggctcgaaagcatgggtagcgaacaggattagataccctggtagtccatgccgtaaacgatgagtgctaagtgttgggaggtttccgcctctcagtgctgcagctaacgcattaagcactccgcctggggagtacgaccgcaaggttgaaactcaaaggaattgacgggggcccgcacaagcggtggagcatgtggtttaattcgaagcaacgcgaagaaccttaccaggtcttgacatctagtgccatttgtagagatacaaagttcccttcggggacgctaagacaggtggtgcatggctgtcgtcagctcgtgtcgtgagatgttgggttaagtcccgcaacgagcgcaacccttgttattagttgccagcattaagttgggcactctaatgagactgccggtgacaaaccggaggaaggtggggatgacgtcaagtcatcatgccccttatgacctgggctacacacgtgctacaatgggcagtacaacgagaagcgagcctgcgaaggcaagcgaatctctgaaagctgttctcagttcggactgcagtctgcaactcgactgcacgaagctggaatcgctagtaatcgcggatcagcacgccgcggtgaatacgttcccgggccttgtacacaccgcccgtcacaccatgggagtctgcaatgcccaaagccggtggcctaaccttcgggaaggagccgtctaaggcagggcagatgactggggtgaagtcgtaacaaggtagccgtaggagaacctgcggctggatcacctcctttctaaggaagcgaaggatatggagagcaggaatgctaagagaagtatccagagcaagcggaagcacactgagaaactttgtttagttttgagggtagtacctcaaaaagagctagtacattgaaaactgaatataatccaagcaaaaaaccgagacaatcaaagagaacagattgtagagcgaccgagaagagaattcttgagtaaggtcaagtagaaaagggcgcacggtgaatgcctaggcactaacagccgaagaaggacgtgacgaactacgaaaagcttcggggagcggtaagtacgcagtgatccggagatatccgaatgggggaacccaatgcagagatgcattattgattagtgaatagatagctaatcaaaggaagacgcagtgaactgaaacatctaagtagctgcaggaagagaaagaaagatcgatttccttagtagcggcgagcgaagaggaaagagcccaaaccaagtgatttatcatttggggttgtaggactgcgacgtggcagtgtaagagatagttgaattatctgggaaggtaagccagagagggtgagagccccgtaagcgaaatctcaagcacgcctagcagaatcctgagtaggccgggacacgaggaatcccggttgaaaccgcgaggaccatctcgcaaggctaaatactagttagtgaccgatagtgaaccagtaccgtgagggaaaggtgaaaagaaccccggaaggggagtgaaaaagaacctgaaaccgtgtgtctacaagtagtcaaagcacattaaagtgcaatggcgtgccttttgtagaatgaaccggcgagttacgttatctagcgaggttaagtcagaaaagacggagccggagcgaaagcgagtcttaatagggcgaaaagttaggtgacgtagacccgaaaccaagtgacctacccatgaccaggctgaaggtgtggtaaaacgcactggagggccgaacccacgtaagttaaaaattgcggggatgagttgtgggtagcggtgaaattccaaacgaacttggagatagctggttctctccgaaatagctttagggctagcctcgtggagaggataatggaggtagagctctgtttggactaggggcccgtcaggggttactgaatccagataaactacgaattccagatatccatacacgggagtcagactgcgagtgataagatccgtagtcgaaagggaaacagcccagatcaccagttaaggtccccaaatctatgctaagtggaaaaggatgtggagttgcgtagacaactaggacgttggctcagaagcagccatcattcaaagagtgcgtaatagctcactagtcgagtggcgctgcgccgaaaatttaccggggctaagcatagtaccgaaactgtggatgtgttttaaagagcacgtggtaggagagcgttctaagagcggagaagttgaatcgagaggatcaatggagcgcttagaagtgagaatgccggtatgagtagcgaaagataggtgagaatcctatccgccgaaagactaaggtttcctggggcaggctcgtccgcccagggtaagtcgggacctaaggcaaggccgagaggcgtagtcgatggataacaggtagagattcctgtactgtgtcaaatcgttaagagcgaaggagggacgcaggaggtgaagcacgcatcgcgatggaacgatgttcaagcaacaagtgcggttaagagtcaaatgcttctaaccagcaacacgagttgtgaagaggagtgaattaaaagtagcgaaggtgtggtaatcacactgccaagaaaagcttctagccagagatgacatacccgtaccgcaaaccgacacaggtagtcgagtggagaacactaaggtgagcgagagaactctcgttaaggaactcggcaaaatgaccccgtaacttcggaagaaggggtgctagccaagagattggttagccgcagtgaataggcccaaacaactgtttatcaaaaacacaggtctctgcaaaatcgtaagatgacgtatagaggctgacacctgcccggtgctggaaggttaagaggagagcttagcgtaagcgaaggtttgaattgaagccccagtaaacggcggccgtaactataacggtcctaaggtagcgaaattccttgtcgggtaagttccgacctgcacgaaaggtgtaatgatttgggcactgtctcaacgagagactcggtgaaattataatacccgtgaagatgcgggttacccgcgacaggacggaaagaccccatggagcttcactgtagcttgatattgagtatcttttaaacatgtacaggataggtaggagccagagaagataggacgctagtcttattggaggcaatgttgggatactacccttgtttgaaggatgctctaacctcgacctgtaagccaggccagggacagtgtcaggtgggcagtttgactggggcggtcgcctcctaaagtgtaacggaggcgctcaaaggttccctcagaatggttggaaatcattcgcagagtgtaaaggtataagggagcttgactgcgagagagacaactcgagcaggtaggaaactaggacttagtgatctggtggtaccgtatggaagggccatcactcaacggataaaagctaccctggggataacaggcttatctcccccaagagttcacatcgacggggaggtttggcacctcgatgtcggctcgtcgcatcctggggctgaagtcggtcccaagggttgggctgttcgcccattaaagcggcacgcgagctgggttcagaacgtcgtgagacagttcggtccctatccgtcgtgggcgtaggaaatttgagaggagctgtccttagtacgagaggaccgggatggacgcaccgctggtgtaccagttgttccgccaggagcatcgctgggtagctatgtgcggaagggataagcgctgaaagcatctaagtgcgaagcccccctcaagatgagatttcctttgcgtaagcagtaagacacctcagagacgatgaggtagataggctgggagtggaagtcctgtgaaggatggagcggaccagtactaatcagtcgaggacttgaccaaagcgaagcaaactggaaggttttttgcgagaaggattatgtttagttttgagtgtaaaagctcaaaagagtacggtggcgaaagcaagaaggatacacctgttcccatgccgaacacagaagttaagcttcttaacgccgaaagtagttggtgggcaactgcctgcgaggaaaggaagctgccgtgctcttttttaatattccggcttagctcagttggtagagcgcttgactgttaatcaagatgtcgtcagttcgagtctgacagccggagtactttgtatggaatgttgtccgagcggcttaaggagcatgattggaaatcatgtatacgggcttatacctgtatcgagggttcaaatccctcacattccgtaaatatatatgaattggaactatgttaacatagttcctttttttctacctaatttttcatatataatggagaaagggaggaaatatcgtgaagctacgaaaactaattccatttttatttttaatatctctattagctataacattttccgcttgttcgacaaagggagaagagaatactgctaagcatagagttaatattgtaacttctactaatatttatgcagatattgctaaaaatatagttggtaaacatggtcatgtacaagctattataaaaaacggcgatacagatccacatgattttgagcctacgactggctctgccaaagaagtagctaatgctaatattgttattgccaacggtctaggatatgatgactggatgactaatttagccaatgctaatgatattcatgtggttaaagttggtaatcaattgatgggattaaaacagggggataatcctcatatttggtataacttaaacatgcctaaaaagtatgttgattatctagttaaaacagcaagtaaaattgatccaaaacatgcagcatattttaagtctaatgctgcaagctatttgcaaaagattgatagtataaagaaaattgctgctaaaattaatgggcgtgaagataaaccggtttatgttagtgagcccgtgtttgattatgcactagaacggtgtcattttaagattggcaatcaggcatttgaagaagctgtagaaaatgaaacggatccgagtgcgcaagttattcatgagatgcaagtcaaaattaaagctagaaaaattgctttctttgttaataatattcaagcatcaagtagtacagttagtggcatggttaaactagcagagcaacataatattccagttctcgatgtaagggaaacaatgcctaatggaattagttattattactggatgaaagcgaattatcaaaaattatttgaaattttttaaaaataactattgcataattagggactatcaggtaatataataaacgttgtgattgagagatcacggtggtaataactaataaaaataaataaaaaaagttcttgacttttaaaacatgattagttattataataaagtgctcttgattaagagatatgacccgttggtcaagtggttaagacacggccctttcacggccgtaacatgggttcaaatcccgtacgggtcactaatggaggattagctcagctgggagagcatctgccttacaagcaggaggtcacaggttcgagccctgtatcctccattgttcgggactaccgccgccgcggtagtctttttttatgcaaaaagaacgaacaagcaaaattattattttatcggttcaagtcctgagaggattcactatgattagtgaagatgccttgtaaccgaatagccaatgtctatatagggggactaatatggaaagacgtttgtttacttcagaatcagtttctgaaggacatccggataaagttgctgatcagatttctgatgcaattttagatacgatgttaaagaaggatcctaattcacacgtagcttgtgaaacgatcgtaactactgggatggtttttgtctttggtgaaatttctaccaacgcttatgttgatattcaagatgtagtgcggaagactattttgaagatcggctatgatcgtccagaattaggttttgatggcaataactgtgctgtgatggttgacatcgatgagcaatcacctgatattgctggtggggttgatcactcacttgaaactagagaaaacaagtctgataacgatgaattggatcaaattggtgctggtgaccaaggtttgatgtttggctttgcgattaaagagacacctgaactcatgccattaccaatttcgcttgctcatcgtttaatgagacgtgttgctgctttgagaaaagaccatactttagattggcttcgtccggatgctaaggctcaagtcactgttgaatatgatggaaacaataagccattaagagtggatactgttgttatctctactcaaactgatgcagaagtttctaatgaagaaatccatcgggcaatgattgatttagtcattaaggaagttattccggccaagtacctagatgaaaagactaagtttttgattaatccgtcagggcgttttgttattggaggtccaaagggcgattctggtttaactggtcgtaagattatcgttgatacctatggtggttacgctcgccacggcggtggtgcattttcaggtaaggatccaacaaaggttgaccgttcagctagttatgcagctcgttatgtcgctaaaaatattgtggctgccggccttgcttatcgctgtgaagttcaattggcttatgcaattggtgtagctcacccagtttcaattatgattgatactgcgggtactggtaaggttgacgatgatttgttaactgaagcagtacgcaatgtttttgatcttcgtccagccggtatcattaagatgcttgaccttcgtcgtccaatctatgaacaaacggccgcatacggtcactttggtagaacagacgttgatttgccatgggaaaagactgataaaacacaagatttgcttgattatattaaaaataagcaataaataaaaagagaaagtaaaaaagaatgaaaaaaacaaacgtgcctatagtcacgcttgcgatttttatgacaacttttatgactgccattgaagggacaattgtttctactgcaatgccaaccatagtttctgacctagatgggctcgagattatgaattgggttatatcaattttcttgctaatgacggccgtttcaactcctttatatggaaaactggcggatagcattgggcggaagccagtttttttgtttggaattgcgttgtttgtcataggctcatcgctgtgtggacttgcacaaaatatggtggagcttatcttattcagagtaattcagggattaggttctggcgcggttcagccagttgccatcaccattattgcggatttatatgctctgcaaaaaagagcgaaaatgttaggtcttaactctggtttttggggagtagcatcagttattgcaccgctattaggtggctttatagttcagcatctatcctggcactgggttttctacatcaatgtgccaattggaataattgcctttttgctcgtaattttttgtttgcaagagcctaaacatagctctaagtctaagttagatttgcagggaaccatttggttagtaattttattgctagctttgatgtttttcttacaagatttaggttcaaacactaatatcgccataatggccgctctagccgttttagtggtaattagtataattatgttctttagagcagaaaagcgcgcagttgatccaataatgccactcactatgttaaaagataaggagttccttgcaattaacctgattacgttattgatttctggcgtagtaatcggctttgaattttacattcctacctggatgcaaggtattaatggtactaatccatctctagccggttttgctgtaacgcctagttcattaatgtggattgtaggttcgttcttaattggcgggatgctaggccgctgggggattaaaaagacatatgattatatgttattggttttagttgtggccgatttggttttgattttagtgccgatttacacatcattctgggtcttctgtgttattgctgcctttaatgggaccgcctttggggcaattacgacagcttcacaggtgagatcgcaggttttggtacctaaggatgacataggcgttgccacttcgtttaatacgctgatgaagtatctgggacagacaatgatggtttctatctacgggattgcttttaatacgatgttggcgcatgggttaagcaagagatcggggttgaatcaagaaatgatgaataaaattgtttctgcagaaaatgccaaaagtctggctgccaatgtagtgccacaattacggcaagttttgttaggcgggttaaaagctgtttacgttgtttctatgattgttattgtagtctcgattgtattgaatcaattgtatcgagatcgaaaattgaagaaaaattaagttgaaggagccacatgcaaagtagagcatgtggcttttttactggaaatttaatttcagtatttttattatatctacatatattgaaatattatttctatgaaagtaaaatagagttaaaagcaaggtgattaaatgaatgttagagatagaattttagagaattatacagagttaaaaaaatcatcacgtattattgctgatgcggtacttgaaaatccaaaaattttgttaaataaaaatgctaaagaaatagggaattatactaatacatctgcagcatcagtaattcgtttttgtaagcaattaaattataaagggttaaaggactttcaaatcgatttagctcaaagtactgtcaaacagtcacaacttaagccaatagatatgattgtaactaaagatgacaaagctgatgaagttatgactaaattaagggttagtttgagtcaaaactttgaagatttatctaagactattgatatcaaggatttacaaaaagctgtatccttaattaaaaaaagtcgagctgtgtatatagctggtattggggcttcaagcttttctgctaaggatcttttttataaactcattagaagtggaaaaacggttttttataatgatgatgtccacattgcattagagagaatatactattcaacgccaaaagatgtcatgatatgtttttcttatagcggattgactcaggaactattacttgcagttaaacaagctaaaaaaaataaaacaccaattgttgcagtgactagaaaatccgaatcccctttgagtaaattagcagatataaatttaaaattaccggatcatgaatcgctgatgagagttggtgctataaattcaacttttgctcaaatgtttatttcaaatgtgctttatttatgctcaatttcaagtgatttaggtgaggtaaaacaagaaatggaggctacaggaaagcttctcgaaaaattaaaagaaaggaatgattaatatgaatatcaaggatttaactacagagaaaagaaacagtgcaactatgcatatcgataatatgtcaactttagatatggttaaaactattaataaagaagatcagaaagttgctgaagcagtaggaactcaggaggagcaaattgctcaggcaattgacatggcttctaagaaataccatgatggtggacgattaatatatattggagctggcactagtggaagattaggtatattagatgcagtagagttagtaccaacgtatggaattagccctgatcgtgcaataggattaattgctggcggtaaaactgcaatgtatttagctgttgaaggtgcagaagattcagaatcacttgctgctgaagacttaggtaagctaaatttaactagtaaagatgtagttctaggattagctgctagtggtcgaactccatatgttattggaggattagactatgcacaaaaaatcggtgcagggacaatttcaattgcctgtgttaataatagtttaattggaaaacatgcagaaatagctattgaagctgtagtagggcctgaagtaattactggatcaactagaatgaaagcaggaactgcacaaaagatgatcttaaatacgatttcaacgggcgtaatgattaaacaaggaaaagtttatcaaaatgttatgattgatgtcttgcctactaataaaaagctagtaaatcgagcaattagaattattacgtcagttactaacgtatcaatagagcaggcgaaagatgtcttgcttaaagctgataaaaatgtaggattagcaattgttatggcaaaaacagggttaaatagtgatgatgcaagtaaactattagaaaaaaataataacaatgtcagccaagttttaaataattagctatactttgaaattaaatttcaaaaatcattgattatatgtcttaaaagtgatatttttatatttaagtaagcgcttactaataaagaataatgaaatattatttctatttgtacaaaaattgcatattagtgattgctttttcaaaagagttttgataatactactttgctaatgaatattagtaataagtaagggagggagaataatgaaacatcgcaattttttattagttgctctttcagttttacttttaggagcaggcttaactggatgcagtcagaaaaaagaggctacagctactccggctgttacacctcataagagtcaagttgttacaacaactatgtattcgaaaaaattacatatggattggaattatgatgtatatttaccagcaggttacaatccaaaaagcagtaaaagatatcctgttttatatatgttgcatggaatctatggtaatcatagaaacttgctagaaagatttaattctcaacaaattcttgatggagaaattcatcgctgtaataaaaagatgatcgtagtttttgttgatggctttaatagcttttatattaatcaaaagcaaggtgggatgcagatggaaagtgccatcgttgatgacatggtccctactattaataaattgtataagacagaaaccaatcctaaacatgtaggtattggtggtatctcaatgggtggatatggtgctgccagattggctttgaaatatccagatatttttggaaatggtgttctaatttctcctgcagtttggtaccgcttgccgaataacaacccaattaaaacttcacagtatgcttttcaagatggaaaaagtaactgggattggaaattttatgatagtgtatttccaactaggtacattaatagtaaatcagagaaagataagttctttgtagagactacttcaagtgatactaccgttccagtaaaaaatgtcgatcgctttgtgaaaactcttaaaaaccatgacattagtgttaagtttgtaagagacaacggtggcaaccataattgggcttattggacttcagcagctccacaagcttatcaatgggcattagataatttaaattaggaggtgtaaaaaatgagcaaagatagtgaattagccagtagcattttgaatgatattggtggtaaagacaacgtttccgcagttatttcatgtatgactcgtctacggattagtgttaaagatgattcaaaaattaatttagatcagttaaagcggcttaatggagttttaggagtagttcagtctgaaactttacaagttgtactgggaccgggaaaggttactaaagttggaactgaatttagtaaattagccggtgtgccacttggagaagaaggcggcgatgattccaatgaaacattagatgaagttaaagctagagctcaaaaaaataaagcggcacaaaaagctaaacatgataagcctttacaacgtggattgcatcatattgctaatgtttttattcctttacttccaggaattattgctgcaggtttagtcaatggtatctgcaatgttattgattatcaatctggtagtgcttttgccaatgattggtggtatttaactattaaaacaataggatggggactatttgcattcttaccaatctttgtagggatgaatgcagctaaagaatttaaaggtagtgcaattctaggtggaattggtggtgtattctgtttaaatttaacaggttttgctgcgtaccctttaaattcactggcagtatcaatgccattcactaataagccatatgttgctggtgttggtggtttgcttaccgcactgtttatggggatctttatcgcatggacagaaagacagattagaaagtttatgcctaatgctttagatacattcttaacacctctttgcaccctgatcttttgtggtttaatttcagtggttttcttacaaccagttggtggttggctaaccaatattatttacgtggctatggacttcttatatgataagttaagctggttcggcggttatattttatcgtcaactttcttagcattagtatctgttggtttgcatcaagctttaacgccaattcatgttatgctgaatgaccctactggtccaactcatggaattaactatttacttcctattttaatgatggccggaggtggtcaagttggtgctggttttgctctttggcttaagagcaaaaataagcgttttaaaaatatggttatgagttcaattcctgtagctattttaggagttggtgaaccattaatgtatgctgtgaccttaccattaggacgtccatttattacggcttgtcttggtgctggtttcggtggtgttgcagcatcattattccatttaggtactgtctcacagggggtatctggattatttggactgttaattatgcagccaggtcaacaggttgaattcttgattgctttgttaatttcttatgtaggtggctttgttttaacatggttctttggaatagatgaagcaagaattaatgaagtctttcctgaatgataaaattaaagaagtaattgaaatcattgtaactattacaatgatttttatttttaacggagaagaaaaaatgctaggaatatctgtatatttccaagattatgatgaaaactatttgaaaaaagcagctcaagctggtgcaaaatacgtttttacgtcacttcagattccagaagaagattattcagatctggatcaaaaattaccgagattttttgaattgtgcgatgaattgggacttgaagtaattcctgatgtttctccggctacattggaaaagctaggaattaaaggaggcgattttgaagccttaaaagataagggattcaaggccttaagattagattatggttttgatgactttgatttaatcaaaaagctacaaagaaatttctttattttattaaatgcaagtgttgtgtcactggactatttagatcgtgccagaaatgcaggggttgattttggtaaattagctttaacatataatttttatccgcatacagatacaggtatgggatggacagattttaaacgtaagaattggatgttaaaggactatggcttaagaactcaagcttttgttcctggggatgcacttaaacgtttcccactatatgaaggcttgccaactgtagaaaagcatcgtggagtttcgccttacgttgcagctgttgaattaattcatgaagcaaatgtggatgatgtgtttattggcgatagcaaggcatcaatcaaaaatcttcggtatattgtagattatcaaaaagataatattttaaacatagaatgttcgctattgccacaatatcaacagctgtatgatcaagtgattgaagtaagaaaggacatgccagaaaagctgattcgcttaagtttgcctagaaaacctgatattccaatttgtaatactttaaataggcgtaaaggcactattacaatgcaaaacaaattagctcaaagatatagtggtgaagttagtctgattaagtcaaatttaccttttgaagcacgtagtaatgtgattggttttatttcacctgagtatgtgaagttgcttgattttattgattcgagtacgaaaatcatttttagaaggctgacatagaagaaaggtgatattatgcttaatttggcaaataagatttcagatgtatatcctaatttgaataaaacttctaagttgattgctgatgtttattttaaagattcaactcttttcctaagtaaaaacttgcaggaattaggtgctattactaaaacaagtggcgcatcagtgattcgattttgtagaaaattgggtttcaaaggctttaaagattttcaaatagcttgtgcacaagaaatacctggcaagcaagataatacggtggatacaattattaatgaaaatgatgagccgaccagtgtgctttacaaattacagattagtttagaaaaaaatattgcagacattggcaaaacaattgatcatcaatctctagcttcagcggtacaattaatgcgagccgcacagaagatttatgtagcaggagagggtgcatctggcttagccgcacaggatttattttacaaattaattcgtagcggaaaagatgctgctttcgtccaaagttcgcacattgctttagagcaagtagctaatattaagacagaagatattttaattaccttttcttatagtggattaactcaagaaccactgctaatggcaaaacaggcgaaagaaaatcaagctaaaataattgcagtaactcgtgcccagaattcgcccttaaaggatattgctgatactataattgcgttaccatcaaatgaaaaattgttgcgttacggcgctgttaattcactatttgcagaaatctttgcttctagcttgctatatttgagtcttatttcgccaaatttaaaagaactaaatatgaaaatgaaaactacgcaaaatttgactaatcaattaaaagtgtagaatctataaaataacaactaaataaattttaaaaaatcaaaaatattttcatgatgaaaataataaaaataaagaaaaaaaggaccagtttggtccttttttagtactttttttgcggttggaataaatctatatttgacaatgctataattataaatggaaagtggcctaaaaataagataacactattgaaagcgcattatttgcctccttgaaagtaaatctaagtagctgtacacttaaattgagctgaataacgaacgttattttttggcagagacttgtaatgcgagtaggaattatgggggcgtaaaaatggatattactagtttagcaagattccaatttgctatgacgacgatctttcactttttcttcgtgccattttcaattggtacgatattcgttgtcgcaattatggaatcaatgtatgttcatacaggcaagcctgaatataaaaagatgaccaagttttgggcaatgtcattaagttaagacattgacaaattatcgacttggacttttaagatcattcatttgcgatttatcgcatttgaatgctcttttttcatgccaaataaacccaaatcttgtttagaaattaggctacacgatataaataatatacagctgatttgggtttgagatttcttttgtcttttcgtcctggtctgatcggaattgtgtaatgactaatttgaataagaatctttttaaagatttcagttgaagaagaaattatatacatagcctggatgacaaaacatgactgtttgaaattgatcgcatattgatacttgcattttttttgtggtacatatgcttgagcatcaatttgactgactgcgttaaacataatcatgtgggcatagatctccatttcaataaatctatcctgcttggaatgaaactgtacgctacctaaagcatatttcaactttttgaatgaagtttcaatgccccagcgcaaatggtagatttctttgatcctttttaagggataatcggctctatttagattagttagaacaacttcccattcttctttgcctgatttaggatcattaattctaaatttacaggcacgaaattttattgtacataactctccaaagtcccagctgccatctttggtatttttagaccgatattttatatattgacggtaatgatggttaaccaaatgaacgttttctgtagccttatgggtttcataataataattagaggtagtcacccagcaagctatatccttatcacactcttgattaggcaactcagctacttccttaaatgcgccatatcccgttttagtacgtatgacataataacagttaggcaggcgattacaattttcaatcatgttaaagccggtataacctcgatccatagtaactatatatggtccgcaatttagctttttaagcatttgaacggcggctttacgttcatccatctttgacttaggctgaaagatgcagtcttgataagtattatttaacaggtcatagagtgcattaacatgaatttggcaatatggctttcctttatgattgagatttccaacgatattctctgatttaggattccagatttgattaaaatcagacccatcaatggcaaatatacgatatttatgatcaaataactggatattaaataaattctgattaaatacagttagaatatgcttaaaacatgcgggtgaaagctgacctttgcgttggacataagcggaagtactgactactttatcgttatttttaatagctttttggccaaaagctctaaacaactcactggtcaaatcttttccttgcatattaatagtagttttaatgactgtagctgcatctaaaaaccgcttcctagtgaaggcatgaggatcatcgataaaatcatgaatatgctttccagtatcattgataatttgatcaagacgatctaaaatatttctgtgaagggctttcataattaacaccagctttctggcaataattttgaaggtttaataatttaatcagagggcgaaaaggtaggttcttttcgcctttattttatgcaaaaaaagaaccaaatcataatgattcggttctacagagattagattcaatttgtcaatgtcttaacttaatgacattgaagttttgggctaatatctttttattgagttttgccgtcggtgttgtaaccggtatcattcaagaattccaatttggtatgaattggtccgattattctagattcatgggggacatctttggtgctccacttgcttttgaagcattgttgtcattctttattgaatctacctttattggtttgtggatgtttacttgggataaagtggggaagaaattacacttattctttggatggatgatcgtctttgggacaatgacttctgcattatggattttaacagcaaactccttcatgcagcatcccgtcggctttgctttacgcaacggtcgtgccgaaatggctgactttggagcacttcttaagaatccacaattaatgtatgaatatggtcacgtaattgttggtgcacttttaactggtactacaattttgactgggttagctgctttccaactattgaagaaacgtaacctttcagacattaacaagaagatctatcgtaagacaatgcgtttaggcttaatcttaatgttaattttctcagctggtgaaattgctgtgggtgatatgcaaatgcaatatactttgcatgatcaaccaatgaagttcgccgcaactgaagctgtttataagacaactggagaaaaggctccatggacggtagttgcaattgctaatccaaagacccatgaagttaagggaattgatattccagacatgttaagtattctttcttaccacaagactactggttctgtaaaaggtatggaagaaattaacaaagaacttgaaaagaagtatggtacacatattgatggtcgcaagatggactactatgtaccagttaatactttattctggtccttcagagtaatgtgtggttttgctgcattattattcttgatggcaattgttggtttaatcatgactcgtaagaataaagaaaccctttataaccatcgttggctattatggatcttcgcacttcttacattctcaccattcttggctaacactgccggttggttaattaccgaacttggccgtgctccatggacagtttatggattatttactattgatcaaagtgtttcaccgaatgtttcagtggcttcacttttaacatcaaatattgtttacttctgcttatttactattttagcaattatcatgattgcattggttgttcgcttcatgcacaacgatccagatgaatatgataaggctcaagaggcaagcaaagtagttgatccgttctcaaagggggccatttaaaatgtcatttttacaaatactttggtttatcttaattggagtattgttctcaggcttcttcttccttgatggttttgactttggggtaggaatggccgtgaagactttagctcataatgaacctgaaagagatcaagttgttaggacaatcggaccagtttgggatggtaatgaagtttggttgattactgctggtggtgcaatgtttgcatcattcccatactggtatgcaaccttattctcaggttactatttaattttattattgatcttagttggcttaattattcgtggtgtgtcatttgaatttagagcaaaatgtgctccatatcaaaagcatatttgggataatgcaatggcgatcggtagcgtaatggccacctttctctttggggtaatgtttatctcaatgattaaagggatgccaatcgatgctaaaggcaatatttcagctagcttctttgactactttaactggttctcaatcgttggtggtattgctttaacacttctttgctatttgcacggcttaaactatattactattaaaactaagggcgttatttcagatagagcacaaaactatgcacaagctttatactgggtactctacgtcggtgaagttgtctttgctttattattgattttccaaaccgacttcatgagagtacatccaattgcaactttagtatgcttagcattaattgttggtttctctgtagcagcacatgtagctactttcactaacaagcaaggaatggctttaacttgcagtggattaacgttgatctcattggtcgccttaatcttctgtggtttattcccaagagtaatgatttcatcaatcagcagtaaatatgatttgttgattcatagtgcatcatcatctaactacactttgattgttatgactgttgctacttgcatcttggtaccatgtgtcttggcttacaccatctgggcatattggatttttcgcaagcggatttcaatgccaagaatcggagaggttaaataatgattgataaacagctatttaaaattgatggcgctggttcaatcttaaaaaaacttgcagggcttgagattctgcaagctttttttatagtaggacaagccttggcactagcgtcagtcttaagcaaattgtgggcaggtcaacctctcgattggctactactaattacttttgcagcttgctttatcgccagacaattgatcagcacactgagagattcaatgttagaaaaatattccggtcgggttgcagaagaattaagacagcagcttttaaataaagtctttcgtgatggacaggctttagtacaaaaacaaggaaccggtagtttgattactatgtccctagatggtgttgatgaggtcaggcaatacattaagttaatctacagcaaagttttaacaatgatgattgtgccagttttaatctttgtcggcatgctgtttttaagctggacatcagctgtgattctgctagtcatgtatcctttaattgtcttattcatgattatcctaggtcatgctgcacaggatcgagcaattaaacaatttggtaactttcaggttttatctaataactttattgattctttaaggggaattgatacgctgaagtatttaggcctgagtaaaagatattccaagtcaatttttaacttgagtgagggttttagaaaaaagacgatggcggtgctaaaagtagcaatgctttcaacttttgccttagactttttcactaccttgtctattgcaatcattgctgtttttcttggttttgacttgatgaatggtaaaattgcactttttcctgctttaggaattctgattctggcgccagattattttttgccaattcgagattttgcgggggatttccatgcaaccttgaatggtaaaaatgcctttaagcggatcaacgaattgattaatctgccagaggaaaaaactaatgatttacctttaaaaacttggtcagctcaagatcaattgaagatcaagaacttgaagtttacttatcaaaagggaaccgaaattggaccggtttcattacaagtccaaggattcaagaaaattggcattatcggaatgagcggatctggtaaaactagtttaattaacctgctcagcggctttttgactccggatcaagtgcaaattgaactacaagggcagaaaactacgaccatgaatattcctgcttggcagcgtcaaatgacctatattccgcaggagccatacgtttttactaagagcttgcgtgaaaatattgctttttataatccgcaggcaagtgatgatgaaattaagcaggcgattcatatcatgggtctggatgccttgttaaatgatttgcctaacggacttgatacggtgattggccgcggtaagcgtgtcttgtctggaggtcagtcacaaagaattgccttagcgagagcatttttggatcctaagcgaaaaattatgatcttcgatgagccgactgctcacttagatatcgaaacagaaattgacttaaagaagcggatgatgccattaatgcaaaataaactggtcttctttgcgactcacagactgcattggttaaaagaaatggactatattctagtgatggatcacggtcaattggttgagcaaggaagttatgagcaattgcagcaaaatcaaggctacttctgcaagttaatggcaggaatgagaggtgaaaacaatgatcaataagattccggttttaagagcattaaaaaatgatcgttgggttcgcccatatttggaaaaatatcgtaaaacgttgattttggcgattgcactgggcattttaactttcgtctgtggcgggggcttgatgttctgtgctggctatttaatcagccgttcagcagctaaacctgaaaatattttgttaatctatgtgccaattgtcttaactagagcatttgggattacgcggccagctgtccgttattttgagcggctggttagtcacaattgggtgctcaaaatgacctccaaatttagacaacagctttatgactcattggagcgcgatgcgactatttttaatagtaagtatcagctaggaaatattctgggacttttgtctgatgatgtcagccatattcaaaacttttacctaagaacgatctttccaatgtttgtagcttggggcttgtatgcaattatcgtaattggcttaggcatcatttccccactgatgggcatttggatgttgatcctgtttttcttgattatttttgctattcctatttggtcagtcttaatcaatggtgcgcggcaaagctatgaaaaaacggttcaagacaagctctacgttgatttgactgataatgtgatgggagtagatgactggattttgtctggccgcagcaaagaatacttggccttgcatgtcaatgatcaagataaatttttgcaaatcaacgcgaagatgaaaaaatttgatcgctggcgcgactttgttttacaaatcttctgggtgttggtaattgtgagcctagtaatttggggtgctgccagatttggcgggcgttcaacttattatactaattggattgcggcatttgctttggcattattcccgactgttgaggcttttgccagtttgccgactgctgctcaagagacgaatatctacaaagattcgcttaagcgtttgaataatttgccagctcctgatcggactaagcataaaccaatcaaattaaccgcaccgtttaatttagtattaactgatgtgcattatgcctaccctcaaactaataaagaggttttgcatgggatcaacttaaatatccatgatggtgaaaagattgctattttgggtcgtagtggtgcgggtaaaagtactttagctgccttgctcagaggtgatcgggtaccagctaaaggacacgtaactttaaatggaattgataccagcaagtttggcgatcaaatgtccaattactttagcatcatcaatcaaacgccatatttgttcaataccacgattgccaataatttgcggctaggtaatgaagatgccacagatgagcagctatgggacgttttgcgccgagtaggtttggccgagatggtgcaaaaattaacggatggccttgatactaaggtggatgaggcaggattacgcttttcaggtggtgaacgccatcgtttagccttagcgcgaatcttactgaagaatacgccaattgtcttacttgatgagccaacagttggcttggatccaattacggagcaagctgtaattaatatgtttattaaggaattatccggtaaaactttaatttggattacacaccacttgcaaggaattgatcagatggatcaagtaatttttattgaagatggacaaattaatatgcagggtacaccggaaaaattatggcagacagagccgcgttatcgtgaattgaaaaaggctgatttaggattatagaggttcattatgctaacgaataaagtgccagaacaagatgtgcatgacctatttactagggtcgcacctaagtatgatttgatgaataatattgttagtttagggattcaaaagagttggcgtaagaaatttttacggcagttagatttaaataaaaattctatttgcttagatttgtgttgtggtagcgctgattcaactattgatttgactaaaaaagctaaattagtgactggtctagattttaaccagaagatgctgaagattgcccaaaaaaagattcgtcaaaagcagctgcagtccaagataaagttgattgcaggggatgcaatgaatttaccttttgcggccaatagctttgattgtgtaactatttgttttggcctgcgtaatgtccctgacgctgttaagacgattcaggaaagctaccgcgtacttaagccgggcggacaatttgctgttttagaaatgtctcagcccactaatgcattagttaaattgggctggcaagcttattttaaaatttttccgtattttgctaagttgacacacggtaatatcaaggactaccagtatttgtcaaaaacaagtaaagaatttctctcggctgagcaattaaaaaagctacttgagcaaaatggttttactcgagtagcggttactaagttaacttacggtgcaggtgcgattcatttgggacgcaaagactaaagcgttcgattgactaatttacgcgtcatctttttgagcaagacggtcgcattagtttgcggcagttgggctaagttagctaatgcccgattagtgttaatcacaagtagtaaattatgtatttaatatatctaaatatgcctattaatgatataattgaccgcaaagaaagcaggtctatttttatgtcaagaatttataaagttggcgaagctgctaagcttctcggtgtatctcgctctaccatgcaaagatgggatcgagaaaaaagactagttgctcagcgcaatgttgccaatcgcagatactatacgcaagagcggctggatgcttttaggggcattaagcctcaccgcaagacagttgcttatgcccgtgtttcttctgtaggtcagaaagaaaatcttaggcatcagatggctttcatcattgaatatgccaatgctagaggcatcattattgatgaacatgtagaagatattggatcagggcttaattataaccgcaaaaaatggaataaattattggatgaagtagaagcaggaaaaatagaacgaatctttgttacctataaagatcgttttgcccgctttggctttgattggtttgaacatttttgtgctaagcacgatactaaaattattgttttaaacaaccctgaaacctctccagatgaggaaatggttgaagacttaatttcagtaattcatgtgttttcatgtcggctttatgggttgagacggtacggcaggaagattaggcgggatttaaagaaggaaggtgaaaagagtgatcatcaaaaccagaacatatcgattaaaacccaatcaaaggatgaagaaggttcttgattcgctttgtgattacagacgcttcagctggaatctcggtttagaaacctggcaaaatatgcatgaagccagacaattggctttaacccagcatcttaaagcagaacttaaaaagcctagaaaaaaacaaaagcttacaaacgctgaaagagaaattctcgcaaacaatcctgtcccttcctggcgcagaattcgtgatgagctgactgaaaacaagcaatactggcagacaaagcttccagctcatgtctttaatttggcgatccaagacttaggcaatgcttggcagaatttttttgataaagcgcagccaggctggggaaagccaaaattcaagtctaaaaaagcacctaggcagggatttaaaatggatcaggccaaaattaaggatggctgcttatttttagaaaagcctagggctgtcaaagaaacatggaacggctttaaattaagctctgctccattgtcggatgatttcggaacaatcagcttttacaaagaaaaaaacagatactatgcatccattccttttaaaatatctgatccagaagacaagcctaagacaggcagatatacaggcgtggatatcaatgttggacatttcaattacagagacggtcaatgcatagtaatgcccaaatcgttagcagcagtctattgcaaaatcaagcattatcaaagacagctgtctaaaaagcgtgtcgtcaatggtaaaatcaaaggaatgcaaagcaagcgctacatgaaagcgagaaacaagcttcaagcagcttacgctcgtgctaaaaatattcaaaatgatttgatgcagaaatttaccacaaagctggttagcgaatatgattctattgtgattgaagacctaagcgttaaaggaatgcttatgagtcatgttgcctccaaaggaatgcacaggtcaatgtttggcagatttagacagatattgacttataaatgcgaatggtatggcaagaaattgatcgtagccaataaactgtacccttcaactcaaaggtgcgcagcctgcggattagtgaaaaaaggcgatgaaaaaatcactttaagaggcaataagaagcatggcaccaagcataatgaatttgtttgttataatccgaactgccgtaactataataaaaaagttgaccgtgacgaaaacgccatgctcaacttaataattctggtaaaacatccagaattaaataaagccttataaaaagaatgcgggcgaagctacgtccgaaaaagaagtcaaaagagtcggtcaatgcgattactcccaagttggaatatcggaaaactgatgaagacgttgataagaaaagcataggcatgttaagccataatgactacaaataaatacaatgtagttgtttgcatatgtttttcatagctgtattgttcagctaaggcatgagtttcttcaatgactgagctgtttagcaaaatcttttggatttgttcgatatcgtttttgctcatttgtcgctttttttcaagtagcggtactaattgctctcgtaattcctttttgctaagagctagcagaataggtagagagtagacgccggtagtcaaatcttctagcgttggcttgtttagctgcttgccgccagtgtaatcaagaatgtcgtcaacaatttgaaaagcaatgcctaaattttcaccaaaggaggctaaagcttgagtagtttgctcatctccattgccaaaatggcttccttcttcggcagctaaacgaaaaagtgcagctgtctttcctttaacattagttaagtagtcgttgaaatcttggcttaggttaaaacgttcagccatttggcctaattcaccagcaagtaaatggtgcattgtgtgagcatttttgatcatgtaatcttgttcggaaatggcgttcaaaattaggtcaaaaaagtgcgtaaaaagcaagtcgccagcgtaaactgcggtgtctttgccaaaacgggcttggatgctaattttaccgcggcgctcgtcagaatcgtcaatgatatcatcatgaattaatgaggccatatgcaaaatttcgattgatgaggcaagttgaataatttgttttgatacagtttcttttttgctagcaatttgagctgacaaaattagtaaactaggccgtaaatatttaccaccgttactagccatttcaaggagtgcatcttgcaagtctgaatatggagtgcggatggttgcctgaattaattgattaacttcttcaagcggtttacgaataagtggatatttttgccaaggttgagagttattcatgatagatttccttataatagagttaacagaatagtgatcctttgaaaggatgtggatcgatgtcattaagtgtatttttagaattaattgagattaaagcaaaaaccgctagtgtcattccctttttcttagggatgtgctacagcgtgtattattatcaccaagttaactggggatttgccctagtcttcttcattgcaatgctactatttaacatggtagtagatatgtttgataactactgtgattattatcacgcagatagcaagaattaccaagagaagactaacattatcgggcgagaaaatatttcacctaatttagttctgggattaattatttcctttagtcttattgcaattttattaggtttgtatctagtcgctaaagtaggcttgcctgtattgtggatgggcttgttctgttttatggttggttatttatattcatttggtccgcatcctatttccagcttgccactaggtgaattgttctctggtttcacaatgggcttcatgattgtactgctcagtgtttatatcaatagttttcaagcttttgattggaactggatcacaatcggtcgtatcttcttattagctttagctgataaattatggatttctaatttaatgctagctaataacttatgcgatgcccaagaggacgaggataatcaccgcaccacaattattcactttattggtaaaaaaggtggcttgattgcttttagtatcaaaaatgttttagcatttttagtaatcttcctcctaccgtttttgggaattgctcctaagacggtttggttaacagtaataattgtaccgttcgtttataagcagaacaagatcttaattggtaaacaagttaagacagagacatttatcacaggagtaaaaacgttgctagttggttcactgacttacttaataacttactttttaggaattctattttagagaggttgaaaattatgaaaacagttgtagttttaggtgctggttttgccggcttgaaaacagttgtcgctttgcaaaagaagttgcgtgaacaagttaagattatcttagttgaccgtaatccataccactacgaaacaattcgcttatatgaagtggctactggtgaaattccctacactgggatgtcatatgaaattaatgatgtaattaatccgaagatgactactgtgattacggatgaagttgaaaaagttaatattgctgataaaacagttgagttaaaggatcatgctccacttaaatatgactattgtgttgttggcttaggctttaccttgagcaatatgggcattaaaggtgtaaccgaaaatgctttgccaatgagcaatgtaaaacaagctgaagctattcgcgaccacctttatgtcgaaatgaaagcttatcgccaagaccatgattctaaacacctgtcagtagtaatttgtggggcaggttttcaagcaattgaattaggaaatgccattgcaaaggttcgcccagaactagctcaaatggctggcgcccaaccagatgaaattaccatcagaatgattgatggttcgccacgtcttttgccaatgttccaaggtaaattgcttgattacgctttaaacacaattaagaaaaataaagtcgaaattattaagccagcttatgttaatgaagtaacctctacctcggttttgtataaaatggctaatgaaaaagacaatgctgagctgcaagaaattaaggcaggtactagaatctggatgatgggctttagtggcagtccagtaattgaggcatctggatttaagaaccgtcgtggtcgggtcatggttggtgatcatttaaccgcgccagaaagtgatgatatctacgtcttaggcgatgtttcaagcgtcatggttcctggtaagaaatggccatatcctaacactggtcaattggctctttcaatggctaactacgctgcaaaagatattaagagcagaattatgggtcaaactagaccggataaatatgcttaccatgacttaggtgtagtagttaacttgggtaattcagaagccgcaggattggcaatggggcatgcttttaaaggatactttgcagcaactcttaagaagattaccattgataagtcggttcttgaaactggtggtattaaagaaacaatggcgattggtcaatttgacttctatcactaaaattgaaaataaaagagaataaaaaatcacttcagtttgatttgatatgaaccccaaatttgggacatattattgaactgctttatttaaaaccatatttcgatattctatcggagtatggttttttagtactgttttaattctttcatgattgtagtaatgaatgtattaggactaaagtgtgaagttgcgccattttatgtcacaccaagaagacctgctattcaccacactatgggtggcttagtaatcgacactaaggctcatgttttaaataaggacggtcaaatcatcgctggtctttattcagcgggtgaaaatgctggtggtatccatgccggtaaccgtttaggaggaaattctttagcagatatctttacctttggtagaattgctgccaatactgcttatgaggataagcatgttaccgatgttattactggcgcttcgcagaaataaagatagagtataaaaaaatacagatatatcaatttaaatattggtatgtctgtatttctatttggagtcattttttccttaccttcgaataaaaacccatgatttctaattcttactaacaaaaataatagtaacttttctaacttcccaaaaaattttgcgacttttttgcgtaataaataatagaggataaatatcctcaaattatttaaggaggactttgcatgagcaaagagaaagaactaaatgtgtctgaagcattaggttttacggatgatttgatgtttcagaatgttatgagagatccagagatctatcgtatgtccttgaatgaggttctaccacatttggacattcaagatatcactgtatgcacgcaagaaaggattgcttttaaccaagaagagaaagtttcgattcttgatgtcctgattacggatagcagaggcaggcgttacaatgtggaaatgcaggtcgcgcataaagcagacatggataaacgagccaggcaatacctgttcaagatgatggaagatggctttttacgacgaaaacaagaatatggcgagctgcacgctgcatatgtaatttttattctgccgtttgatcccaaaggaaaaggcttgaagcgatatacttttgtttatactgctaaggaagacccatcagttgaattaaatgacgattctgcgataatatatttaaacacaaagggaacaaaaggcaagatcagacctgagcttgatgacctttatcgcatgattgaaggcaagccaacttcaaatggaaaactcgtcagtcgaattaaaaagtcgatgaacaattatcgtagaaccgaagaatggaggcaacacgtcatgaacacagaagaagtagcagaagcagcaaagcagcttggcatggaagaaggcatacatgaggcaactgttgcagcaatccataaaacgattaacatgcttagaaggatgaagcgcagtcccaagcaaatcttgcaagaattagaacaagattatggcaatgaattttctgaagaagaactagcagactttgtgaaaaacgcctagtcgataagatataatgatagctgtgaagctatcattttttagataacgggggcttgatcatgaataatcctgaagaattacaacattttttagatgttctgctaaaagagagtaactttaccagagcagctaaagaattatatatttcccagccttatttaacgcagctaattggacgaattgagaaaaaattaggcactaagatcatcaaccgagatgagagaccctatacgttaactcctgcaggtctaatttactatcaatatttggagaatgtttcatataataagcagcaattagggcgcaagctggaggcatatactcatcctgaccaacagataattaaaatcggcattttggagagcttaggtacatatttattgccagaaattttgccgcaatttttgcaagaaaaccccaacgtcaagattcagctatttgaaaatttccccagagaaaatgaaagaagactgcttaatggcgagctggattgttatattggtcagacgccagaagcacttgactcgagtttagatgtggttgcgggtggcgaggaacgctattacgtagtgatttcgccagcctcaccatattaccaagcaggaaagtttatcttaaattcggatgaacttgatctaaaagaggtactgcaggagcctttagtgttgagttcacctggttcagctatccggcatcaagttaatggcttatttcagagattaagactcgaaaaaaatattgtgatggagtctaatagtattattactgcaactaacttggcaattcacggcgtgggtattaccatttcttcggcaagtattatcagaagaatggaacaaacgccaattaacttgttgccactagatcgaaagttaatggatgttgtctttttcattactagcaaaagcggggaaaagtcgccagcgttagaaaacctaatttcaatttttcaaaagacgcatttacaagcaaaaataggataaagaaaaaggcatcatgcgatgccttttaaattgctttgatttctattgttttcgtttcatgtcgatcatcttcggctcaatgtagaagtgatagaggaaggaataaccaagcagtacaaaggtaattccttcaatccaaccgccgaatacatcagatggatagtgcacgtggacgaaaattctggtgtaaccaatcatcagtgggaataaagcccaaataataatcaataaagtcttccagaatttgcttctcactaaaagaatggttaggataatcaaaacaccaaatagcgccgcgctaccaactgagtgccccgatggaaaactataaccatccgcataaactaagtgcttgacctttggacgctgccgcattgctgcgtgtttgataatccaattatagccattagcacagatcatgacaccagcggtaaaccaagcgtatgcatattgcttaaagaccagtaaaactatgaaaacaatgattgtttcaattgtgatcacgcttgtattgccgagattagtaaaatctttagcaaaagcgacattagctggattattgttgcaaacaatgttgaccacagcattatcaaaattgtgaataaattgtgagccggatgaaaccagtgcggcccagacagcataaataaccacgaagcagataccaggtattaaggtgtccttaggtggtcgtttcgtattaatcaaaaaagtactcccctcttgaaatttatagcatttgtggtaaattataatcattatctataagaaaataaaggtcgagaagtagtaacaaggatatttttttcagagagagactggttggtgcgaagtcttagaataaaattgtgaactcgtctcttaataaaacctagcgttgccatccgcgttaaggagcaattaagtgtcacaattttgtgaaacttaggtggtaccgcgatgattcgtcctatgattttttcatagggcgttttttgatagtaaaggagagtttatcttgtataaccacaaagtagttgaaaagaaatggcaagattattggtcaaagcatgatacctttaagacaggtactgaccctgataagaagaattattatgcattggacatgttcccattcccatctggtaagggacttcacgtaggtcacccagagggctataccgcaactgatattgttgcaagaatgaagcgtgcacaaggctataatgtgcttcacccaatgggctgggatgcatttggtttaccaactgaacaatatgcattgaagactggtgaagatccagaagttgttactaagaacaacattgctaactttaagcgtcaattgaacaagttgggcttctcatatgattgggaccgtgaagtaaccacttcagatccaaattactacaagtggacgcaatgggtttttgaacaaatgtataaaaagggcttggcatatgaagctgaagttcctgttaactggtcaccagacttaggtactgttgtggctaatgaagaagttatcgatggtaaaactgaacgtggtggctacccagtatatcgtaagaatatgcgtcaatggatgcttaagatgactgcatatgccgatcgcttattagaagaccttgatgatttggattggccagaacccgttaaggaaatgcagcgtaactggattggtcgttctgaaggtgcgcaagttactttcaaggtaaaagacagcgacaagacttttgatgtctttactactcgtcctgatactttatttggtgttagctatacagttcttgcaccagaaagcaagcttgttcaagaaattaccacacctgaacaaaaagaagcagttgatgcttacattaagaaaattgaatctaagtctgatcttgaaagaactgatttgaacaaagataaaactggtgtcttcactggtgcctatgcaattaacccagttaatggcaaggaagtgccagtttggatttctgactacgttttagctagctacggcactggtgcagttatggctgttccagctcatgatgatcgtgactatgcttttgctactaagtttggtttgccagttaacccagttattgaaggtggcgatattgaaaaggaagccttcacaggtaatggcaagcacttcaattctgagttcttagacggcttggataatgaagaagctaaaaagcgcatgattgaatggcttgaagaccataactgtggtaagaagaaggttaactacaagttgcgtgactgggacttcagccgtcaacgttactggggtgaaccaattccagttattcactgggaagatggaaccacttcattagttccggaagatcaattaccacttcgcttgccacatgcaactgacattaagccatctggtaccccggaaagtccacttgctgacttgactgactgggtaaatgttgttgacgaaaacggtagaaaaggtaagcgtgaaaccaacacgatgcctaactgggctggttctagctggtactacttgcgttacgttgatccacataatgataaggaattagctgactacgatttgcttaaaaagtggcttccagttgatctttacatcggtggtgcggaacacgctgtgcgtcaccttctttatgcaagattctggcacaaggttctttacgatttgggtgttgtgccaactaaggaaccattccagaagctttacaaccaaggcttaatcttgaagaatcacgaaaagatgtctaagtctaagggtaatgtagttaaccctgatgaggtgatcgatgaatatggtgcagattcacttagaatgtacgaaatgttcatgggtccacttgatgcatcaattgactgggatgacaatggtcctgcttcaactaagaagttcttggaccgtgtgtggcgcctctttgtaaacgatcttgatttgaaggccattccacaagaaagaatcgttgataagaatgatggtgaacttgacaaggtttatgcagaaacagtcaagaaggtaactgaagactttgaatcattacactttaacactgcaattagtcaaatgatggtcttcatgaatgctgctcaaaaggctaagaccattccacgggaatacgcagaaggctttgttaagcttttagctccagtggctccacatatgatggaagaaatttggcaagtctttggtcatgatgaatcaattacttacgctaagtggccaacttatgatccagctaagttagttgagtcaactgtagaaattatggttcaagttaacggtaagcttcgtggtaagttccaagctcctaaagacgctgcaaaagatgacttgcaaaagcaagcaatggaaattgaacacgtaaagaagttcttggaaggcaaggacgttaagaaagttatcgttgtgccaaacaagattgtcaatattgttgctaaataagttagattttcctaaaaaataataagaatacttattatttagatttattgaattgattagttgagacttttattgggaaaattttaatggaagaaaataacttaaatagcaaagatacacaaaatacttttctaaaaggttccgcatggatgacctttggctcaattgcctcgagaattttgggtgctttgtatattattccgtggtatgcctggatgggctcctacggcaatattgccaatgctttgactgcgcgtagttataacatttatacaatttttatcttaatctcgacagccggaattccaggagcaattgctaagcaggtagctaagtataatgcactaaacgaatatgggattggccgcaaattatttcgcaaaggcttaattttaatgaccgttttgggtattgtctcagctgcgatcatgtattttgcttcgccgcttttagcttcaaatgggagtcaaagtgatccaagacaggttgcagttatgcgtagcttgtcttatgcgattttaattattccaattttgagtatcatgcgaggctatttccaaggttatgccgatatgatgccaagtgcgatgtcacagtttgttgaacagtttgcccgggtagtctggatgttgctaacggcgtttgtaattatgaaactgcaacatggttcatatgttcatgcagttattcagtcaaacttagcggctgcagttggtgctttatttggaattggcttattaatttggtttttgttttctagaagaaaacaactagattatttggttgcccattctaataatcgcttgcgggtctcaacgactgaattatttggtgaaattattgcacaagcaattcctttcattattattgattcaggaattaccttattttcattggttgaccaatataccttccacccgatgattgccagtctagttcatgctagttcagatacaattgaggactggtatgccttgtttggtttgaatgctaataagttaatcatgattattgtttcgctggccagtgcaatggcggtaaccgcgattccacttttatcagcggcgcatactaggggagactataagagcatttcaaagcagattgctaatacgatggacctatttttatttgtaatgattccagctgcttttgggatggcagccatcagtaggccaatttatacagttttctatggtccagatctattggggagcaacgtactatatctgtcgtcatttaccgcgattagtttaggattatttacggtgctgatggcgattttgcaaggtctttcgggaaatggactggctatcaagtacctggttttaggattgattttaaaagggatcctgcaatatccaatgattttcctatttaaggtatacggtccgctggttgctactaatttaggtttattaattattgtggcactttctttaaaacatttggaagtgcagtatgattttaatttgaatcgaactagtagaagcctggctggagttacagcattttcagttggcatgttccttgtggttaaattatgtgaaatgggactaggcaagtttctcaatcctgatcatagatttaatgcattggtgctagtgattgtagctgtaggtgctggggttgtcttttatggcttggtgacattgaagacagggttagtccaaagcgtcttaggtagtaaggtagaaagtattttagttagactacatatggataaataaaagaaaatcaaactgttgtgatggcagtttgatttttttgttataaaaaattgcggctctttgtcaaatcttactgataaggtgtcaagtctaatttttcctggtagttgagtaaatttttggccgggggatggcttacttgagtaagtttttgtgcaatttctaagtgaatcaaccctaattgtcaaaaaactgccactccctcttgcaaagacgataattagtgttattatataatgcataagaaacgcaagaaatgtgtataaaaacaattatttttagcaaaggaggcaaaaagcatgattaatctgactgttaatacaatcaggcttagcggtgtcgctgcaagagcaaaccgcgtcatgttttaactgtcctttagacaaagtgaatcaaagataatttaacagcacagtattaagtacacccggtttatcggcggcatcgttaactgaagattttttgttatgcgtgttagctaatgaggtattaagatgaacaagggtaagactttaatgactggtgctgttatttttatgtgcgggagcatgctggcggcctgcggcaagagccaaggagcatctgtcaagcagaatttaaactggatgaccagtgcgaaaatcatcaccatggacccatccaaagccaccgacaccacgtccttccagcagattgaaaatacgactgaagggctctaccagctgggcaaagacagcaagccggttaaggtactggtcaagaagacgactgtcagcaaagacggtctgacctggacttttgaccttaagaaggggactaaatggtctaatggcgaaaccgtaactgccaaggactttgtctattcctggaagcggacggtgaaccccaagacagctagccaatacagctacattttctctgggattaaaaatgccgaccagatcgttgctggtaaaaagaaggccgatacgctgggcgtgaaagccgctggcaaatacaagctgcaggttagtctggaacataagattccatacttcaagcttttgatggccttctcagtctttttcccagaaaaccagaccgcagttgaaaagtatggctcaaagtacggtacgtcatcaaaaacgaccgtttataacgggccattcttgcaaaagggctggacgggctccaacttgtcctggaccatgttcaagaacaagaactactggaacgccaaagccgttaagctgcaaagcatccactttgccgtggaaaaatctccgtcaacggcctactacctctaccaagatggcaagctggacacggcaagcctgagctcacaagcctccaagaacctgcaaaagtcaccagactatgttgtaagaaagaccaacgggacgacttacttccaatttaacctgaaaatgaagaagttccagagcaccaagatgcgtcaagccatctccatggccctagacagaaacgccttagccaagaccttgggcggcggctacacgggctctaagaactttacggcagctggcatgaccaaggtgggtgacaaggattttaccgacctctctcaaaccaaggaaagcttgctagtaacgggccaccacaagcagctggcccaaagctactttaaggaaaggttgaaggaacttggcttaaagaagctgtcctttacggtgattacggcacacgtccaagtccatcggcgaatacttccagagtgctcttgaatcaacttttggcaagcaaatcgacgtcaaggtgcaaagcctgccaaccaagtcccaatttgccaagatggactctggtaactttgaagccacgatcagcggctggaatgcggactttgccgaccaaatttccttcctggactgcatgacctctactaatggctacaactcaggcaagtggatgaagctgctggcaaaggctgaaaacaccttgctggttgatcagcggctcttactacttcgaacacgtctacattgccaagtaagccagtaaaaaatgtattatcatgctaggtattatgtagtagaaagtgaagaataaagcgtaaattgctataattaagatagaaataagggaaaatcttaattagtgaaggagcgaaagataatgaaagactcaaattcaccaatttacaacatttggatggtggttctgctggttgccgcatatgtctggccaatctttggcttagcaccagccatctacctctttatcaagcgcaaggatgagaatctggtccctttgaagaattggattactctagccttgatctggcagattgttttgtggctgctcttgattttggttgtcgtctccttctgggtcggcgcctttgcggtcaaccacggttaactaaataactaattgaatagctagataaaagtcagtggatgccactggctttttgtctgcttaagcaaatgtcataactatatcactatttatagccttgaatagatttaatcggttacataatgcatcacgcaggtgatatctcacaaaaaattaacaaaagcatcaggttcaaagattgttaagccgatgttaaatagaactagcaagggtgaaagcggtacatttttttctttgttaagctaatgtaaactaagaaaaataacgttagaatattaaccgattttcgaaaaatggtaaagatttttccaaaatccggccagaatttaaacaaagttaagtattttactttgatttaacatttccccctgaatgtatttaacctccattaattactatttacttagtaagaattcaaggaggataattatgttaggcaagaaaactagagtagtggttatcgcacttgctctactggctatagtcgtcggctgcgttgttggcagttcaaaggcagacaccaagggtgtctctgggactgttaacgctgcggggtcttcagccctgttgccgctagtccaaagcgcagctaaatcattcatggatgaaaatccagacagcgtgatcaacaccaacggtggtgggtcaggccaaggtttacaacaagtctcagatggaaccatcgacatcggtgactctgacttgttcgcagaagaaaaattagacaagaagtccgcatccaagctggttgaccaccaagtggccatcaccgcgattgccccaatcgtcaacaaggacgccggggttaagagcttaaccacccagcaattgatcgatgtttacactggcaaggttaccaactggaaccaagttggcggcaatgactgcaagattgttttgatctcacgtcctgcttcttcaggtacccgggcaacttttgaacaatatgctttaaacaagactgccagtcgttcaaaccaatcactggaaactgacgactccggtactttgatccaaatgattcaaagcgttgaaggggctgtcggctacgttgccttatcatacttgactggtaacccagacgtaactgcagttgccatcaacggcgttaagccaactctggacaacgtttacaacggctcatacaaggtttggaactacgagcacatgtacaccaagggtcaaccaaagaaggctgctgttaaggcctttttaaagaagatgttaagtaaagaatacgaatcaaaggttgaaggcatgggctacggtgttgcttctaagctttcagacaaggctaagaaagaacacaagtaaaaggagagtgatttttcatggacaaggtagttcaaaaagccatcgctagcgataagcgctggcgggcagtatacattgcttgcgggctcttgattgttgctttgacgctcttgatgggggcattcctgctctaccaaggtagtcaaacctttatcaaggctcaccacagcatctgggaattcctgtttaccagcgactgggcaccgcttgacaagaccggcctgtttggcgggaaagtcggtgcagcagtttacatcgtaggttctcttgaaacctgtttgctggccctggttatctgcttgccatttgctatcggctcagcagtttacatgacggaaatctcaccaaagatcggtgaaaagtacttccgtccagctacggaaatctacgtttcaattccatccgttgtttatggttggtttgggatgaccaagctggttccattgattaaaaatattttccatccagccatgggtgggtactcagttttggccgcatccattgttttggccatcatgatcttcccaaccatcaccgcggtttccgctgacgccattaagtcagtgccaatgagctaccgtgaaggtgcttacggtttaggcgcaacccgctggcaagtaatcggcaaagttgttttgccagcagcttcaggcggcatcttgaccggggtgatccttggcttggccagagcgatcggtgaagccttagccgtagccatggttatcggtaagactcgctcatttgcggcaaaccttttgtcaccaaccagcaacttgacgagtgccatcgcagccgacatgggtaacactgcccaaggcggggaatacaacctggctctgtggaccatggcgctgctcttgttcatcatctcaattgtcttgattgtgctcattcacaaactggctaacggaaagaaggataaataatgaaccgtgctaagaaaaaagatcggtttatgaccggcgtcttttacgccatcggctggctgatgctagcattcttgctgtatttgacatttaccattatctttgatggcttgaagggctttagcccagacttcttaggggctgccggcaacgggatcttcaaccaattctttaacactctttacttagttttcctttcgctcttagtttccgtgccaatcgggatcggggctggggtttacctggctgaatacgccaaggaaggcaagctcttgaccatgctggaagtaagtatcgaatcactttcttctctgccatccatcgtaatcggtttgttcggctacctggccttcatcatgtggacgggaatgagctggaacatcgtggccggggccttgacgatctcaattttgtcaattcctttgatcactactgaaaccaacaatgcaattcgtgccttgccaattgaatacaaggaaggttctctaggtttaggtgcaaccaagtcagaaaccattagaaaagtcttgattccagctgctatgccgcaaatcttgactggggtcatcatggccgctgggcgtgggtttggtgaagccgccgctttgctgtacacgtctggtcaatccacttacatcaactggcacaacttctggaagattacttcacctacttcacctttgaatccattcagaagtggtgaaactctttcactgcacatctgggtcatgagaactgaaggggctttgaaccctaaggcaacccaaattgccaactttacttcagctgttttagtagtactcgcactgctctttactttagttacctgccgcatttcagacaagatgcgtaagcgcaataacggaggaaattaataatggaagacaaaattactatcgaaaacttgaacctttactacagtgatttccacgccttgcatgaccttaacatgcacattccaaagaatgaaatcacggctttcatcgggccatctggttgtggtaagtctactttgcttcgctgcttgaaccggatgaacgacctggttgaaggctgccggattgacggttcagttaagttagatggtaccgacatttatggcaatgaccttgacgtcactgttttgagacagagagtcggcatggtcttccaaagaccaaatccattcccaatgagcgtttacgacaacgttgcttacggtcccaagatccacggcgtaaccgacaagcaagaacttgacgaaatcgttgaaacctcattaaagcaagctgctatctgggatgacttgaaggaccgtttgaacaagtctgctttgggtctgtctggtggtcagcaacaacgtctttgcatcgctcgtgccttggctgttaagccagaagtcttgctgatggacgaaccaaccagtgcccttgacccaatttcaacttcaaagattgaagaattggctctgcaactgaagaaggactacaccatcgttatcgttacccacaacatgcaacaagccgtgagaatttctgacaagactggcttcttcttgctgggtgacctggtagaattcggtgaaactgaccaactcttctccatgcctaaggatgaaagaactgaaagatacattactggtcgtttcggttaaagaccagtaataattagatagagtaagaaaggcagaaacaatgactagatcaagatttgatgaagaattggacaacttgcaaaagtccatggaagacatcggcaagctgtgccaggaagccattttggaagcaaccaacaccttgtttacgggcgactaccatgaagctgaagactcagtcaacttgcaccgccgcatccacaagagcgaacggaaaattgaagacagctgcttgcgcctgttgatggagcagcagccagttgcgactgacttgcgggtgatcagttcttctttgaaggccgtttacgacctggaaagaattggggaaatctctgctgatattgcagaactcgtgttaaatgaacacctgtccatcgccaatgaccagctgaaccttaagtccatggtgcaaacctcaaccagcatggttgatgatgccgtaaccgccttgtccaccaagaatctggaactggcgcaagcggttatcgaccgcgacgacattgttgacgatgactttgaccatgcccgagaaatcctgatcaacaacttcagcaaggatggcaatccagaatacctgatcaacctgatgatggttgccaagtacttggaaaagatcggtgaccacgcggtcaacgttgctaagtggaccaagtttgtggcaactggcaaggccggaagataagtcttggaaagtttgctaaattaatattcttcctgatctatctgcatagcaaatgtttctaagctataattagagtagctatttgcagatagattagggagaatttttttatgactgaaatatggtgtgtggaagacgacgaaagcattcgcaaaatcgaaatgtatacgctggagtcgatgaactttaaggtgcgtggctttgaagacgggacgacttttgtcaaggccctggcggaaaagcatccagatctggtcatcttggacctgatgctgccagatgaagatgggagcgatattttgaaaaagctccgtggcaactcgtcaactgaagaattgccggtgatcatcgctagtgctaagacagccgaatatgacaaggtgaagaacctggattctggggctgacgattacttgaccaagccttttggcatgatggaaatggtctcccgggtcaaggcggtcctgcgccggaccaaccacaagaaagaagacaagatcgagaaagacgggatcaagatcctgctcaagcggcatgaggtttatgtcgatggtcaggaaatcgagctgaccttgaaagagtacggcctcttgaagctcttgatcacccatccagggaccgttttttcccgagaagaaattatggatcaaatttgggaaacgggcttttacggtgaaacgcgcacggtggacgttcacgtaagaaccttgagacaaacattgagtgaggctggtagccatatcgaaacggtgcgcggggtcggttatcgctaccatgaagggaattaatgtttaaaaaaatatttcgggcagtctttttatcaacggcagtcatgctggtctgctcggtggttttgagtgcgctttttttaggcatcgactatgatcacaatgaggtcaacaccttggcttcgcaggccgatttggcagccagcggggtcaacaatgggggaaggaagtacttaacccagctaaaaggagaaaattaccagattacctggatcaatgctaaaggcaaggtactctacgacaacgaggaaaacccagccaagatgggcaaccacgctaagcgcaaagaagttgctgaagccatgaaaaagggcgaagggcaaagcgagcgctacagcacgaccctgtcgacggttacgatgtactatgccaaaaagctgaaagacggcggcgttattcgggtggcggttacgcggaattcgatctggatgaccatcttgcaattgctgacgctgatgctgatcatcttgctgatcgccgtgattgcttcttggttcgtagctaagatgatctcgcagtccatcgtcaagccgctgaaccagttagacctggaccagccgcttgaaagcaagagctatgaagaaatcaagccgctgttaacccggcttgacagtcaaaacaagcagattgctgaccaaatggagcagctccaccagcgggagaaggagttcaagacggtcaccgatgccatgcaagaaggcctgatcttgatagacctgaacgaccaggtcctcttgtccaatccggcggtagtatcgctcttaggatcaaagtcttctgaagttttgccagatgatgttaaaaagatcatcgatcaagacaagcggaccgtccacaccgaagggatcgtggaaagagaagggcgcaacattcaaattagtgccagtccgattttttcacggaaggtcttaaaagggacttcgatcttggtcgttgacgtcacagaagaataccatgaagagcaggtccggcgcgaattcacggccaatgtgtcccatgaattgaagacgccgctgcagtccatcatggggtcagcggagcttttggaaaacaacctggtcaaggaagacgatcggccagccttttaccggaagatccatgaatcttcagctcagctcttgaccttgatcgatgacattatccggctgtctcacctggacgaaaatccggaatttgaagaggtccggatgaaccagaagagtccggtgaccgaggcgatcgaagccttgcaggcgtcagctgacaagcacgagattgagctgaaggcggctttggccgatacagaaatcaaggccaacttccgcttggtttatgaaattgcctacaacctgatcgacaacgccattcgctacaacaatcctggcggccaggtcaagattgcggtcaaggaagtgcgggggcaagctattttgcgggtttctgacacggggatcgggattccgcttgaagcgcaaaaccgcatctttgaacggttctaccgagtcgacaagtcccacaaccgcaagactggcgggacgggacttggtctgtccatcgtcaagcacgcagtacagcagtgccatgggacgatccgccttgaaagtgaactgggcaagggctcaacctttaccgtggtcttcccagctttaaagcatgaagacaaattatacagccaaaattgcttatttgatctatgataaaggtgtcgaaagaaaataagagctctatttaaataacatagacataatcatgggctaagtgtatataaagtgtaatttagaactatacaatatatacgtaaaatcttatgattaaaggtgaacagatattatagccacttttttaggattcgattaatgtaaaaattacacaatgaattaataaaaagcgccatataataagcaaaaaaagtcatttaaataactaaaataaactgagacctaaaagttgagactgtaaaatagtttgtgtaaggatgaatgattccttaaatttatttctttaaacattagaaaaaggagttcctttctcgtatgattggtttgaacaaaaaaaacacatacagaaagaagaactccttcatgaatgattttaccaaaaatatagcacaagctctattcaatccagacaaaataaacgatttattgcgcaaagagctacaacaggctgttaataacttgctagaagctgaattgactgcctttctgggctatgatccctatgccagaaatggctggaatactggcaattctagaaatggtgcttatttccgcaaggttgatacccagtttggaccaattgaagtgcaagtgcctcgagatcgcaacggccagtttcatcagcacacgctgcctgactacaagcagcactcggatatcttggaaagcatgattatcaagctttactccaagggcgtgaccaccagggaaatagccgatctaattgaaaagatgtatggcagccattacagtccagctcaggtatcaaatatttccaagcagatgattcccaaggttgaggcttatcacaagcgcaagctaagcgacaagtttttctgtgtctatttggatgcgacataccttcctttgcgccgagaaacgtttgagcgtgaagcagtctatattgccattggcatcaagcctaatgggcacaaggaggtcattgactactgcattgctcctagtgagaacattgaagtctggacagatatgcttcaaaacatgaaatcccgaggcttaaagcaagttgagctttttctttctgatggtgttgttggcatgaaaacagccttggccaggacttatcctaaagctcattttcaacgctgtttggttcatgtcatgcgcaatatctgcgctaaagtacgcgtcgacgatcgtgaaaagatcatgaacgaattcaaacaggtgcatcaacagacaaacaaagaagaagccacagctgtcctgcatgacttctataccaaatggggcaaggtttacagccatgttatcagaagcttgaaagacatagaaccagatctgctggtcttttataactatcccaagcagatcagagcttcaatttattcgactaacatgattgaatcatttaacaatgtgatcaagcgcaaagctaagcctaaggcagagtttccaactgaacagtcgcttgatgcttttattggtattcaggcaatgagctacaatgaccgttatttcaatcgaattcataaaggctttggtcaggttcaggacaccttagaatcctactttgattaaataaataattaaaaaatcaatttacgagaaagaactatttacacaaaagatttgacagtttctaaaagttagacacttttaggtctttttctacgtaaagtcaagcataataagaagtttggcttcattttttgtttaaatttcaacttaaacatcttttagtgtcgatttatttttttagttagacacgacaaataagcccagatccatatctgatttttgggcttagcgttataatgtacttgatcaattaattacgactaaagtctttttgattatgtgtggctacgttgtaatcatatggttgatcattgataatcagggcataaatggttctgattagtttatgaattgaagcaatagctatctttttgaaccctttggtttgagaggatagctttttgctttcataataatctgctatatgacacggatttgtcttagctgcattatcaatttgtccaatagctcgataaagcaacttacgtgcgactgcattgccatgtttagtaatacttaaattagagtccatttctcctgactgatatctgcctggatcaattccgataaaagcattgattttattaggattactaaatctgcgtaaatctcctaactctgctaaaactctgacagcagtggtctgtgcaaagcctggaatgctttctaggttttctaaatcatgattaggcaaagacttcgctaacttaaccattcttgcgattaaattttctctttgatcacttaaattaagcaatctgtgtgcataatactgcacttgctcgacttctatgctagagcaagatacaactggataagcttgataagctaattcaattaatttatctgcagtccttagagcgtgtttaaaagcaatcccctttaagctcattaaccagttaataagctgttttttatcttctcttcttactaagtcacaatgaggatatcgcacaactatttgccagtaatttttacctttagcagaagaaaatagattttcaatttcaggaaaagtcgattgtagagcttggtgaagtcgatttttagctattaccaagtcacttgtcagctggtcatagaagcggctcaaagcattaagctgcttataagtttgagattgaagttgattaattggatgatgatatagtctttgaattaaggctaaatgataagcatcagttttatcagtcttattatgacgtagtcccatatccatttcttttttagctttaagaggattaagaattacataatcatagccatagtcttccagaaaagattgcagtgtacgtgaataaacaccggtagcttcaaaaataatttgcggatgtttagaaaaagcggttaattcatgaagcaattgaataaaaccaggacgattattagtaatggttagttcattttggctttcaccaattagttcacaaacagtagaagtagacttgcttacatcaattccaaaagtaacttgcataataaaaacctccaaaacttagtagtaaaacgtatttacttaagaaatcagatctaattttctaaactcgacatctagtgtccacattcttcgaagagactattgaaaacttaagtaaaactgccagtttattatgcgacatcaagtgtctaaagacctcagggcatatcgttttaccactactttaattctacaaaagaataaaaatagtgaatcaattatcccgtcggataactaattcactatttagcttagaatgtttactatgtctaaatttaataaagaacaaaaaatagaaatttatcataaatggaaagatgaaaatatctcaatcagtcaattggctaaagcgtacagaatgaatctagctaatttagactatatgcttagattaattgatatgcatggaatagaaattttaactactaaaaaccaaagctattccaaagagtttaagcagcgaactattgaacaagcaatctttggcaataaaccatacttacagctgtctttggaactggggtttaaaagtattggcatgcttaacaattggattagagaatataagaaaaacgggtataatgtcattatcaaacagaaaggacgccctgcccgtgaccaaagaaaagcagaaatctcgcaaggaactggagaaagagatccagcagctgaaagaagaaaacttgcgattgcgtattgtgaacgaatacgtaaaaaaactaagtgccttggaccaagaagatcagaagaaatagctagggtgattacggatctaaggcaagaattcaaagttagtttaaattatgtattagctgcgattgcagagcaccctgagctacctataattgccagaagctcatactacaagattatcaaacgacagcccgccaagcctaaacggtcaaagcttattgctagaatccatgagatttttaatcatcatcaaggccgctatggatatcgcagagtagctttgcagttaatcagagagggctggaaagttacggagaaaaccgttcgctattggatgcataaattaggtcttaaaggcatcaggcgcaataagcgcaaatattcaagctataaaggtactattggcaaaatagctccaaatttaattcatcgtgatttcttcgcagccctgcctaacacaaaatggtatactgatatcactgaatttcatcttaataatgaaaagctttacttatcgcctattctagacggctgcggtggcgatatagtttcttatactatctccaaacatccagatatggatttagtaatgacaatgcttgacaaggcttttgccaaagaaacagctcttaataactgcatttttcatactgatcagggctgtcagtatcaaagccctcgttatcagcgagctttaaaactccatggtattactcaaagcatgtccagaaagggcaacttcatggatgatgggctaatggagaacttctttggcctgctcaaaactgaaatgttctatgatcaagaatacaagtatcataatcttcaagaattaactcaagcaatcgaggaatatatcgaatactataacaacgaaaggataaagagcagattaaaaggcttaaccccgaaagagtatcgaagtcaagcctctattaatccaatattttaattgtctactttttacgtctcagtacaaaaattatagagccggttttttagtactgttttaattctatcatgattgtagtaatgaatgtattccttgattgcttgttctaattcacccatggttttgaatgtcttttcaaagccatagaacatttttcgtttaagaatgccaaagaagccctccattaagccatcatctaatgaatttcctttacgtgacatagactgggaaacaccatgatttttaagccaagcttggaaaacagcgtgctgatattgccagccctgatcagtatgaaaaattaacccattgagtgcaggatgcttttgataagcttgatccagcatgtccattacttgttttagtaccggatgacgatttaatgtataagcaacaatctcttgcgtacatccatccataataggcgacagataaagcttctctccattaaggtgaaattcagtaatatctgagtaccaatgtctatcaggaataattgctttaaaatttcgtttaattaaattgggcttgatttttccaacagtccctttgtagcttgaatatttaaatctgcgtctaattgcaatggcatatagatgcatcttggtcattaatcgtttaacacgtttatgattaactataatgccttcacgtcgcaattgggcagtaattctacaatagccatatctatgcttgtgctcctcaaatatttctttgatccgttccataatcttttcgttttttaaatctttatcatctttagttaaagtgtagtaataattactgcgtgataaatgcggaagatcaggattggagttaatcgtatcaagcacaaacttaacggttacgtggagttcttgccttagttgcgtaaccgcagaaactatctcttgtgctgttggttttcggttcttggggagactaaggcgctcaatttttttacaaattcgttctcgacagtaagtcttaagttcttctgtttgaggtcttttatttgcttctgaagctcttgaatctgtttgtctttgtccttcatgggtaggtctgcctttcttgtgattaatgacattatacccgtcttctttatatttgcgaatccaattgtgaagcataccttggctgggcagtcctaaatccaatgatacctgacgagccgtttcatgatcataaataactcttttgatggctttctctttaaattcaactgagtaatctttatagctattatcaagaatttctatcccatgacgttctattaaggcaatcagataaaacaaatttgtacgatttaccccatattccttagcagctaggttagctgatatattataatttttccaattattgtaaatatcaattttgtcttgtttggataatttagtcataataaaaacctcgaaattcttgtccgaatttcggggttcatatcatttgtttctgtagtgccttttttataaatatcaataaattttaggagtgtaataagattttagaattaattatgttcaactgctgttaacgtaatgactccaattaattcaagtgccaaaaatgtaattccaaggatagtaatcatagtgcccatctccttatctaggagataaataattagaatatttatcttttaattcaatcattgcttacactgttactgtaccacataattgcgtattatgaaagcgattacattaaattgggagaaaaaagttgacctccgaagaaatcaacttgtgcccctgccaaggacctatattatagcattcatttattctgcatgatcatcctttttctcagttgagtcaggattttgatcgtcagacttggtgaagtcaccattcatggtattaggacgaccagtttgataatcaactgtgtgcttttcagccttaggtgcgctttgaccaggttcaggcataaccatagcagcaataatatataaggcaacgccaggaaatacacctgtgaataatatcaatgcagcaccgatgattctaacccaagcaggatctagatcaaagtagttagcaataccgcccaaaacgccagctaaaattttattttgtgattttgtaagtcttttttgcatgataatcaactcgtttctaactgttctatctcttttacatatattatacagcaaaggcatgaaaaaagtgttgattgctcaacacttacacataattatgatgcccgctaaaagattcgaactttcactcagtcacctgaacagcgacctgaacgctgcgcgtctgccaattccgccaagcgggcaattttctttggtacatgaataatcataccaaatatttggtaaaatgtaagcataaaatactttaattataaaaaaggatggaaattcatgttttttagcaaaaaaataaaacgtgcagcaattaccacgattgctgcagtatcaattttttcttgtggtgcggtatttgcaactataccagttagcgcagatacaactagtagctatcaagctgatcaagttaaactaaatgtaaagtcagcaattgcaattgatagtgattcaggtcaaattttgtatgccaaaaatgcgactaaaactttgccaattgcttcgatgactaaattagtaacagtttatttaactctgcaagcaataaaaaatcataagctttcatgggatcagaaagtaaagccaacggctccgatagtaaaggtagctaataatgcagaatattcgaatgtaccattaaaactaggacattcgtatacgataagacaactttatcaagcaaccttaattgaatcagctaatggtgctgctatgctgcttggtcaaacaattgctggctcacaaaaggcatttatcgatcaaatgcgagctcaagtaaaaaagtgggggattgaagatgccaagatttatactgcttgtggtttacctaatggcaatttaggtaaagatgcatatcctggtgtaaataaaaatgctgaaaatacgatgtcagctaaggatatggctattgtcggtcaaaaattaatctcggcattcccagaagtattagaaactacacgcttagctcacttaaactttaaagatgctggtcacgtaactaagatggctaactttaactggatgttaaaggggctttctcaatatgatcaagcttatccagttgatggcttaaagacggggactactgatgctgcaggggcttgttttatcggaactgtacaacacaatggtgctcgtttactgactgtagtaatgggcgcacgtcaccgtgacggaacggatccagctagatttgaacaaactaaaaagttaatgaattatgtttttaccaagtatcgtcctgtaacaatgactgctggtagccaaatgaatggcgctaagacaattaaagttgttgatggtgataatgcaactactaatttaggacttaagcaaaagactactatctgggatccagctgatggcaaaactttagtggcatcattgaataaaaaatctgtagaagcaccaattaagaaagatcaaacagttggtgattatcaatttaaatctggtaatgaaaagattgtttcattgtctaatcctaatgggatgaacgtcaaggctaaggcattgtcagctaataacaaggtgaacttttttgtcagaatttggcgctggattttcggaggaagataaatatgactgaaatttctgaagatatcttgaaaaaggtaattaaagaaagagaaagcgatacacataaaggcgattacggtcgtgtactcttgatcggtggtagtgagaactatggtggcgctattattatgtctaccgaaggcgctattaatgctggcacaggtttgactgctgttgcaacacaccctttgaatttagcaccgttacatgcacgagtgcctgaagcaatgtttatcaactggcgcgatgctaagttagcagatttaatcaaaaatatggatgttgtagtttgcgggccaggattaggcatgagtgatctcgctaagcaaattttagttatcttgcgaagatgtacttcagaaaaacaaaccgttgtcttagatgccagtgctcttgatttaattagtcaggataagaacttattgccaactaatgctggccacttaatcttgacgccgcatcaaatggaatggcaacgattgagtcaaattcgtattccgtttcaaacagatagtgccagtattgatgctttaaaccaattgattccagatactaatgcgcttttagtactcaaatcgaatcatactcatgtttataatgggactggtcaaatttttgttaatccaattggcaatccaggcatggccactggtggaatgggtgatactttagcaggaatcatcggtgggatggttgctcaatttggcccaggcgttgaaaccgttcaagctgctgtctatcttcattctttagcaggtgacttgcttgccaaagataattatgtggtacgaccaacggaactttctaaagtattgcctaaattgatgaaaaagtattcagaattggcataaacatgttaaaattctaatagtaaataaatgcatccctagttgagggatgttttttaacgcttcaaagacgaaaaagcataatataattgagttaaatattaataaaaaagaagattaacatatttatgaaaaaaaacattattatcggcgtaactagtatcgttctagcttttggtgcaattatcggcttagctaaggtatgcgcacctaagtctgatgtctcacaagaagctgctacaacgcagactaaggccaaaactaagaaaataaataaaactaagaaaaaacaaactaaaaaagtagataatggtgctttatatcgaccatatagcgatcctaaggacttgcgcaaggcaggcacttggaagaaaaagagtgagcctaaaaaatatcctaagattaagccatatgaaaaggatttgactttgcgggtatcattaaaaggaaaccggacctatttgttaagaaaaggcaaggttttgtataccatgttatcaactggtggaatctacaagaagggcaagtcattgaccccaactggaacttttaggatccaaaatggtcgtggagacagctttttcaattataacttaggtgaaggagctaataattggactagttggagtcctgataacgtgtacttgttccactctgtgccaactaaagctgattatagctataacttaaaagaagcagtcaaattgggaagaactcaaggttcacatggttgtatccgtttgagtgtacctgattctaagtggattatggatcacatcccagatggtacgaaggtaatcattaaaaataattaacaagaacgttgctttttaagcaacgttttttaaaaaattgcagtaaaaaactttgttcaaagcgttcaagattttaatccaactcaagaatggtttttttaaccaaattagtggcagaagccgttttttcctgctataatcatgtttgccaagaagtcaaaagtagtagttattttctttttaagcgagtctatgttggtgcaagatagatactagaagataatgaaggcgtgtttgactgataaaatcaagaatttaaataagcggatactttgtatcaatctgagtggtaccgcgggtttttaactcgtctctttctacatttgtagaaggagacttttttatttagaagagaggaataagatggactttaagaatgaagtagttgacttggttgctagtcaagttgatttacctaaagaaaaaattgctgcattaattgaacgccctaaaaatgctaagatgggagactatgctttcccagcatttattttggctaagactttgcacaaaaatcctgcagaaattgctaaaaatattgcggataacttatcaagtgataatttcgctaatatccaagcagtcggtccttacgttaactttgcgattgaccatgaaaaattagtttcatcgactttgaaggatgttttgactgaaaaagaacattacggtgatcaaaagattggtgaaggaaatgtgccaattgatatgtctagtcctaacattgctaagccaatgtcaatgggccaccttcgttcaactgtaattggtaattcaattgctaagacaatggagaaggttggctatactcctgttaaaatcaattacttaggtgactatggtactcaatttggtaagttgattgctgcctacaagcactggggtaatgaagaagacgttaaaaaagatccgattatgaatcttttccactactatgtaaagttccaccaagaagctgagaaaaatcccgaacttgataatgaaggtcgtgaatggttcaagaaacttgaagacggggatccagaagcagttaaactatggaaatggttccgtgaggtttcattaaaagacttcaagcgaatttataaagaactaggcgtaacttttgattcatacaatggtgaagctttctttaacgataagatgcaaccagtaattgatgaattaaaagaaaaaggtcttcttcatgaatcacgtggtgcgcaagttgttgacatgggtgaaggtgaaaatcctgctattatcgttaaatctgatggtacttcaatttacttaactcgtgacctcgccgctgctgaatggagaatgaaagaatataacttcgttaagatgctttatgttgtaggtaacgagcaagcccaacactttgttgaattgaagactgttttgaaaaagatgggttatgactgggctgatgaaattcaccacgtaccatttggtttaatcacccaaggtggtaaaaagttatctactagaaaaggtaacgttgtcttcctcgatcaagtattaaaggatgctgtttcacttgctaaaaaacaaattcaagaaaagaatccagatttagcagatcaagatcaagttgctcatgatgttggtgttggtgccgttgtcttccacgatttgaagaatgatcgtttagacaattttgactttgacctagaagaagttgtgcgttttgaaggcgatactggtccttatgttcaatacactaatgctcgggcacaaagcgtcttacgtaaggctgctgcgatgggtgaaaatcctagcgaaactgatctagctcttgatgatgactgggcttttgccgtagccaaagatttagcagatttcccaagaattgtagctagaagtgccgaaaagtttgaaccttcagtaatagctaagtttgccttagatttagctaaaaaattcaataagtactatgctaatgtgaagattttaaccaaggacgataaaattggtgctcgtctcgccttagttcaagcaacatcaatcgttttaacggaatcacttagattgttaggtgtcaatgctcctaaagaaatgtaagagaaaaacaatgaaaataagaaaataacgcttacattctgtgaaaaattgttcatatttcaattattagggtacaataggcatgtaagatatttaggaggtattttttaatggcttattttgacaacggtaatcaaatctttaaagatgctcgtaagaaccattacgctgtaggtgcttacaacactaacaacttggaatggactcgtgcagaattacgtgctgctgaagaaactagaactccattgttgatccaagtatcaactggtgctgctaagtacatgggtggttacaagttcgttaaggacatggtagctgaccaaatggattcaatgaacatctcagttccagttatcttaaacttggaccacggtgactttgaatcagctaaggaatgtatcgctcttggttactcatcagttatgtttgatggtcacaagcttgatactgaagaaaacttagctaagactaaggaaatcatcaagttggctcacgaacgtggtatttcagttgaagctgaaattggtaagatcggtgaaaaccaaggtgctgatggtggtgaattagcatcagttgaagacgctaagagattcgttgctgctggtgttgacaagcttgcttgtggtattggtaacatccacggtgtttacccagaaggctggaagggcttgaactttgaccgtcttaaggaaattgctgaagcagttccaaatgaaccacttgtacttcacggtggttcaggtattcctgaagaccaagttaagaaggctatccaacttggtattgctaaggttaacattaacactgaattccaattggcattccaaaaggctactcgtgaatacatcgaagctggcaaggacttagacaagggtaacaagggttacgacccacgtaagttattgcttccaggtactgaagctattaccgatgctatgaaggaaatgatcggttggttaggtactaagactatcgatgacgaacttaaggatgcttcattcgaccgttcatcattaaacgaagaataatcatttgataattatttaaataaagtctagcgtttgctaggctttatttttttaggcaaatttggtgataacttaattgaacttattataaaagaaatataaaataaaaaattgaattataaagaaagtataaaaagagacttttatggaagcaaaaatgttaaatccatttatgcctaactttggtcgttttcctaaaattattatcgatcagcaagaagctttaactgattatttaactgggttgcaaacacatgatgctaagtatcaaacttctttagtttatgtcacaagaggatcaagaaaaacagttttccttttaaatgttcaaagatctttagaagagttagataattggatatttattcgtttaaataatggtcaaggagatttgctttttcaattaatgcatggtttgcaacgagttgcaggtatttcgttagttgacttgttaaaaagtgttaaaagtttgaatattatgggaaagggaattactgggcaagcactacaagaatcacagcaaattgattatgatgagtatatttcaattttgctaagtcgtttaaaaaagcagggtaagtcaattctaatcggaatagatgaaattgaaattagtgacgatgttcgggcttttggctcagaatatcaaacattgattggtgatgaataagatatttcattattgatgacaggattgccaagcagaatatccgaagtacagaatgaataataccctcacgtttttactatgtagtaatcgtgtttatttatcaccgttggatgaaaaaacaatagctaatagctatgagaaagcatttactaaaggaaaacgtgaaattgatttcatggtattggatgaaatgagccgtgcagttaaaggctatgcttatgcctttcaaacgattggttattatgcttggcgatttagtcgggaattattgcagttaaacgaagaagttttgaaacaaacaattcgagctgcaaaaaaaggacctttttaggaatgcctatgaaagaatgtatatggatctttccaaaactgatcgcgattttatcgaagcaataatcaaagctggaaccgatcgtgtcacgacaaaacaattgcaagatatcttaaacaagcctattaattacatttcggtctatcgtgcaaggctgttagatgatcaattgattacatcccctcaaagaggagtagtacaattggcgttgccattttttgcagagtttgttgaaaaatctaatttagaacatttatcttagaaaatgagcaaatataataaattatggcaatatatcaaagataataaggctggggactttgagctttcttttgatgagcttggccagcaggctggggttgccttagatcattcctttttgcgttataaaaaagaattaccagcttatggctttgaggtgcaaaaaatttcattgaagaataaagtggtgaagtttcatcagttgtaatgaaagctattaataactaaagtagtagtttgcgataatatcttcaaaattagtaactatgttttgttttagaaaaagactaagatgtaagtaaaaaatgggaggattaataagttactatgaagaaggttttatcttggccagtatattatcaactatcagagatttatacggcgccattaaatgtaatttggtttgtctttggcgcggcaatgtcgtttcaacaatatcacatgtttaatttgattaacattttactgtgcttagtagatgtttttctgtttgatttagcagttaatattgctgataattactatgattctcttcatggcaaagatcgacattttttgactgatataaatccaattggtcgtctgaagttacctttaactgatgttagaaacttagtgtggattagttactttatttcggcgattccgggtattattttggtttatcgcaccggctggccagtactaataatgggagttgtaggatatttcattggaatattttacactgcgggtcctaagccactgaatgcaacaccgatctgtgaattagtggtatctttttttatttcgtatttcattatgctagtaagcatctatgtcacaatttacggcacttatcctttgacctggaacttagcattaactactctgataagatgtttgcctttaacactcattttctatgctttgcagttagctaataatacttgtgatttgcatgaagatttaaacaatgggcgccatactttagccagttatactggtaaaaaatatgctcttaaaataattaagacgttgattattgcgggattattatttccaattatcgttgttctttttggtttagcaaaatggccattgatctttagttgttttttgttgccaatattatggccaaaattaaaacaattttttgagcatccggataaacaaactacctatttacaaatgattaagtatttatcaacgcgtggtgctagttaaatcgttctagacaataagccaaattataagctaaaattgcaatttccaaccggctttgaaagcctatcagactacgtgctcgattgttctcggcattgtaataggtcagaagcgaaaagtcgctttcaattgttctgcgaatagccatcaattgatgatcattgtgctttttagctcctgtcatatttttacgatatggtgtccaaagttcataacccatttgttttagctgttgatgcagttctttgcctaaatagccttcgtcgccaagaagatagtaattagatggatgggtattttccagcagttcaactgtctccctggcatcatgaactgatgcttttgttacgacataatcaagaatgtaaccgtcatcgctaacaatgacatgaactttgaaaccatagaagtaaattttcttggtggccttataaccaatgttggcataaccgcgaaaaattttagcacgatagttgcgaattggttggcaaacaggtaccggaaagctgtcaatgatcaagaaatgtccattcaggtcaacctttttattcatttcttgccgtatctgataaatcaattgcaatagctgacgtgaacgtcgattaaaacgtgagtgtgataaacaattgaaacattcacagaatcttctttgtgattcaattcctgtcttagcttgccagataagtaaagccaaaatcagactgtccgtagttttaatttgatcaatatttcgccgatgagtaaactcagccggtgcatacaaacgataccagtgccgacaaattatcactaaatctttaaaactaacttgtaaatggtggctaaaacgcttaagcttaaggcagttcaatcagatcagactcttttctattattactatttacaagtcgagtctaacaagattggacttttttattaactaaaacgatttaactagcaccacgcgtatttatcaatatttttcattacatatatagctatttatacagtttgggttttagtttagaggaaaattatggctttgaatatcatagatagaggattacactcattgataatgaggggggaaaataattatgtttggcaaaaagaaggataagaattcagaattttcaccagatattatgactttaaaaaatgcacttgaggaagtacgttttacgcccgaagttgagcatgacgcagaattaattaacatgtttgacgaagcaattgataaagccgagaagggtgaatctgttcaaacaatttatggtcgactcagttatcaaattacgcaatatattcaaacacatcatttcaaggcacccaagccagtaactgaattcttacatggaagtactggaagcgtagccacgggattgacttcagttccagtttcttggaatacagtacattaggaattttttatgtgcataaaattgacaaatactgaaaaataattgattaattaaacagagtagcaggtaatactactctgtctttttattgcaaatatgatgtcaaatgcgaaactgtaaaatagtttgtgtaaggatgaatatttccttaattttattttcctgaatattagaaaaaggaatccttttcccgtatgattgatttgaacgaaaaacatactagaaaagagattccttcatgaatgattttaccaaagatatggctaatgctctattcaatcaggataaaattaatgatttatttagacaaaagctccaacaggctgtcaatgacctgcttgaatccgaattgactgcctttttaggctacaatccttatgagcgcgatggctggaataccggaaattctagaaatggtgcttattaccgcaaggttgatacgcaattcggacaaatagaaatcaaagttcctagagacagaaacgttgagtttcatcaacacactatgccagattataaaaggcatactgatgttttagagcaaactgttatcaagctctattccaagggcgtcacaacccgagaaatcgctgatttgattgagaaaatgtatggcggctattattctccagctatggtttccaatatttctaaagaaatgattcccaaagttgaggcatatcatcagcgacatctgtcagataagttcttctgcgtttatctcgatgccacctatattcctcttaagcgggtcactcatgagcgcgaagcagtttatatcgccatcggtatcaaacctaatggtcataaagaagtgattgactactgtattgcgcctactgaaaatattgagatttggagcgaaatgctcaaaggcttcaagagtcgcggccttgaacaggtagagctcttcttgtctgacggagtagttggcatgaaagaggctatctgccagtcctatcctaaagcgcattttcaacgctgcttggtacacgtcatgcgtaatatcagtgccaaaatgcgggttgacgatcgaaaaaagcactggatgaattcaagcagattcatactcagtcaaacaaagaaatggctgtacaggtgctgcatgaattctatcaaaactgggaaaaagcctacaaaaacgtagttagagatcttagacaggttgagcctgatctgttaaccttttacaactatccgccagctattagagcttcaatttactcaactaacatgattgaatcctttaacaacaggcttaagcggaaaaccaagcctaaaacagaatttccaactgagcagtcgcttgacacctttattggagttcaggcaatggattacaatgaccgttactttaacaggattcataaaggatttgggcaagttcgagacaccctagaatcctattttgattaaaagataaataaaaaagtcaatcaacgagagagattatttacacaaacttcttgacagtctccaggattgcattactatagtttatgtaagttatgaataggtagtaagtaacttatgaatttcaagatattcattgatttaatgaggagaacgaaaatgaaaattttcaacaagaaaaacttattattgtcatctgcagttgttgcagggatgctattcacagttggtactaaggctgttcaagctgatacaaccgatagttcacaacaagcaactacaaatactttaaaggtaaatgcaaatactgcagttccagataagaatttgattacgccagtagctagccgtgataatcaaactcttcgtcaagttgcagaagcaaacaacacttcattaagtgtattggaaaagttgaatgataatattgatccagataaaaccattgctaatggcacgccattatatcttccacaaaatgaagatttgtcaggactatttggtatatatcttagatcagatacttcagttccaagctcattaaagagaaaatattatgatagtctttcagcaaaagagagagctgctaagatgtggattattgcacgtgaatctggtggaaattacaatgcaagaaatggtatctatattgggcgttttcaattaacaaatacttatttaaacggaaattatagcaaagcaaatcaagaaaaaacagccttacgatatgttaagggacgttatggttcatggtcggcggctaaaagattttggcaggctcacaactggtattaataaataaaaggaaagtggaaaaattgaaatttcaaaaattagtaactagtgtattattagtagctagtaccactggtgtattaatgactgcacctaaacgggttcaagctgtagctgataccaatactactgagagtggaaaacccgtcgcaaatattgttaataagcctaacctaacaaaacaaggttatgtgttaactattcaagccccatcagggaagatttatgtagggcaaaagaattacaagaaacaattaactactactaagccaatatctaacgcaaaatcagttagttggaagaaaattaaaaacgttagatttagaattgaaaaagttgcttatgcgacaaaggttataaaatttggtggagcaccacagtatctgcttgtctctaaagataaaaaatatagttgctggacaacgcgttattctattaaatactatttttggaatactaaaaagatgcaacaagtaattaagccattgtctaaattgacaactagaaactcttcaagcctaaagaagattcggaataagcaagattttaatcaagctgtattagctgctaaaagattacctgctaatcaaagaaaagttgtcttagaatctttgaatcaagtgaaaaaagttggcaatattgataaggctgaagataatattttgttgttcagcttttagtgatatttctagcacagatttaaaattaatataaaactgaagttagaagaatttatttaatgttgagggggaagaaattgtgagaagtatatctaaaggcattgtatctttgatagcagctacaatgttattagcagcaggggaagggatagttcctaatactgttaatgcttctatgctagattcggctaaaagtagccagaatagtcaagaaagtagtagatacacttggcagagtgttaagctaacagatggaactgaaatgcaaattcttccagataattcttcaaaattagctggaaagattaaatataacggtcaaatatattcatatcgcattgtttcaaataatggtgtatatactatttatttgaataatgaggaagtatattcagttgatataaataatagccagttacctacgacaagtgtaggtggttttgatccatttattaattttacgtacgcaaatggtaaggtagcatttaaacatgcaggtagaaagtattattatttgacgacagagaaatatagtgcagatacggtaagaagactgaaaggaactactaaggatattattattggtttgcttggatttgttcctgtagttggcccctatgtttctgccggcggttttgcctatactgtttataatgatatttttggaaagaatcctaaaaataaatggtatacgataaaagaatattgcactagagggtatgaatattatgcttggaagacctatacttatactgactctcatagaaaacatctacaatctgttaaatgggagtataaaaaagtattatgagaggaattttaactagtagagttgctagaggcatattagcgtttatatttatattttttacgggttggtctgctgcaagattaatagtacagatagaacgttctgaatcgatatatgactaccttattttgggaggatttagtctagttttaggtattttggaactctatagattaataaatagtaagtaacctgaaaattttagaaaattgaacgttaacgtgaatatcaatataacacgcttagcttaaatagtcttattagtttttataattcagtaagataatcggcaaattggtaatatttagttgtagtcgcttcaaaggataaaaagtattcaacttggattactcaagctttcttgcaatactactacctaaacagcaagtctatgcaaggtgtgattaagccactcaagcgaattgctaatagattaaataccagtctgaagaaggcaaacaacaaacgtgactttaacgctgcaatgaaagctgctaagaagttacgtggcagtcaaagagattttgttttacgttcattgaatcaacttaagaaggatggctccatgaatgtagaaggaaagaacttgttattgtttggcttataaaattaagatattaagtagtaaagctcagcagaattgcttgagctttatttttttgtgaacggcagtcgacaaacagtataatgaacttatatcaaaagcactgaagttatttagaaaagaagatggaaaatggctaaaaaagttacgccacgcttggtattagcgattttgtcggcagggatgctctcatttttaggaatattggatgaaacggccacgacagttacttttccaacgttaattaaagaattttcgattactactgatcaagttcaatgggtaaacacactagtcttattggtaattgcgaccattgtgccaattagctcacagattagattaagaatttcgactaagaaaatttttattctaggagttcttttgtttactttggggctaatcatcgatattttatcaccgcgctttgatttattgttattaggacgggcaatgcaaggagtcggcacggggattggcttaccgttaatgtacaatattatcttggctgaagtacctaaagaaaaactaggctttatgatgggaatcggcactatgattactgcctgtgccgttgccttagggccagtttttggcggaatgattaccgatgcacttaattggcgctggatcttcattatttcgctatttttaatgaaaaacgcccggaaattccccgtattttaatgcggggatggatagggccaagctgacctaatggtcagctttttttattaaaaaatgaagacatatgttcgactttcctgtaaaatataaatatctaatctacagaaggaggtgaaacacatgaagagaatgagcagtttagcctaccattttggcttgaaagtacgcttttatcctagttctaaacaaaagaaaatcatcaagctaaattatgatgctcagcgttttgtctacaactcttatgtaggacgtaatcggaacaattatcgggctaagggctacttagctgttagacaatatcaagtaatgccttttgccttttctgttcttaataattatgagactaagctagcagaagaagtagtcgccaataatgagttattggctaagccaaagaacattcgcgatgcctatagctttttacgcgttaaagaaattgacagtctcgctattgccaatgcgattcaaaactatcagaaagcttggaacaactatcgcaagcttggtcatggaattccgacttttcacaaaaaacgtagtgattggtcatatcagaccaactgtcagtatcctaaacagacagaagcctttcttgataacgggacagctagatttattgatgctaagcacgttaaattgcctaagctaggcgttgtccgcattgccagctttagaaaattgattaaagagcgtttgcttaatcatatcccaactagaattggcacagtcacgattaaaaagaccgctgacgaccagttttacttatcaatgcaactaggcagcgatattgcctttgttaaggaattgcctaagacgcagagtcaaattggcatcgacctcaatcttgataatttcttaacagcatctaacggagcaatggtggctaatccacgattttatcgcaaaaccaaaaagaagcttgcccatgcccaacgtgtcttgtctcgcaggcagcgcagagctaagaaagagggacgcaatttgcgcttagccaagaattatcaaaaacagcgtctagcagtcgctaaactgcacgataagattcgcagacagcgaaatgacttcttgcaagtactctcaactgcactaatcaaaaaccacgatttagtagttgccgaggaattaagaagcaagaacctgttaaagaatcatgccttgtctcaagctatttctgatgttggctggcgcagttttctgaacatgctggcatataaggcagacctatatggcaaagagttcaaaacaattgatcctaagtacaccacccaaagatgccatcaatgtggcagtattatgggacaaaacggttataagaaattaacgcttaaggatcgagaatggacttgtccaatctgtcaaacgcatcatatccgtgattggaatgcggcagtaaacatcttagaaaaaggcttaggcaactggcagaattctaaaataaaaaaagcagcctaagctaggctgcagtccgctcgcaactcgcggactcaaaaggctttggtaattagacgacctctatcggcaatagtcaaaagattattgttggtaagtcaagtccgtatctaagcaagttggtgttctggttagcgcaagctaacgagccagccaccaagccccagaatttattctggggtagttgacttatcttgagtctatttacgggaagctattcaattcggcagattaatccgcttgaaaaagtgaagttcaagtatgtgcaatggctatctttggctattgggctggtctgtttaatgctgggctttacacggattgctaaacattcatttttctcaattcaagttttgggcttcttaattctaggaattattagtttattaatttggctaaaaatatcttggtctgataaggcggctttgattagtccgaaactgtttaaaaatttacgctttagtatgcagctaatagcttattgttttgccaaaattgcaacgctagctttgggcttcatctttccaatctatgttcaggctgtcaatcatggttctgtttcattagcaggctgggttactttccctggtgcggtaattaacgcgctaatggcggctgtagcgggaaagctgtttgataaaaagggtgcgcggctgccgattattatggggataatcgctagtttgattttgatgaatgttttagccccattaagcaacctggcaattgtcttgttatacgttctttattatggcggatacgggatgtgctttggcagtttgatgaccagcggtttgatcactttaggcaaagaaaatcatgcacaaggtaatgcgatttttaatactttgcagcaattttcaggtgctttaggaacagctttagctgagaccttgattgcgctagcgcagaataaatatctgactaatggcacagcagtcggttctaagtggacatttatggtattactgattttgataattattaatttgctcttggctcttgcctttgtgccgaagaagaaatgaagggaagttcagcgaaagctggacttttttaatttaaaaatatactaactctaaatacgcaatatttgcttaatatattaaacaaaattataattattttgattaatataaattacataggagcaaaacatgaatccagatttacttgcggcacttattcttgaaggtcagaataatattaaaaatattgctattattcctcgtgattatcattttgaaaatagtttaaattatgtgttagtaggtttgcggcgggctggcaaatcaacgctattatttaaaagggcgcaggatttagtgaataaacaaaatgtggattggtcacaaattgtttacttaaattttgaagatgaacgattagatggttttcagttggctgattgtaataatatcttaattgcagccaatcaattaacaactaagaagcattattttttatttgatgaaattcaaaatattgctggctgggaaaaatttgctcgtcgtttagcagatcaaggtgaaagtgtttatttaaccggtagtaactctaaggtgttgggtcatgatattgttctgcggctgggtggaagatatatgaccaaatatgtggcaccttttagttttacagaatatttaactgctaaaaaaattccacatgataaattatccgtcttggatacagttaataatggccaaattcgtgctgccgcaaatgaatatctatgttatggtgggttgccagaatctattatcttaacagacaagagaaattacttaacaagtatttatcaaaatgtatttttagctgatatcattgtccgcaataagattcgtaatgaaaagacgatttcattattacttagaaaaattgccgatacagtaatgcaccaagtttcagaaactgtcaaatcttttgtgtaaatagttctttctcgtaaattgattttttaattatttatttaatcaaagtaggattctaaggtgtcctgaacctgaccaaagcctttatgaattcgattgaaataacggtcattgtagctcattgcctgaataccaataaaagcatcaagcgactgttcagttggaaactctgccttaggcttagctttgcgcttgatcacattgttaaatgattcaatcatgttagtcgaataaattgaagctctgatctgcttgggatagttataaaagaccagcagatctggttctatgtctttcaagcttctgataacatggctgtaaaccttgccccatttggtatagaagtcatgcaggacagctgtggcttcttctttgtttgtctgttgatgcacctgtttgaattcgttcatgatcttttcacgatcgtcgacgcgtactttagcgcagatattgcgcatgacatgaaccaaacagcgttgaaaatgagctttaggataagtcctggccaaggctgttttcatgccaacaacaccatcagaaagaaagagttcaacttgcttcaagcctctggacttcatgttttgaagcatctctgtccagacttcaatgttctcactaggagcaatgcagtagtcaatgacttccttatgtccattaggtttaatgccaatggcaatatagactgcttcacgctcaaacgtttctcggcgcaaaggaaggtatgtcgcatccaaatagacgcagaaaaacttgtcgcttagcttgcgtttgtggtaagcctcaacctttggaatcatctgcttggaaatatttgatacctgagctggactgtaatggctgccatacatcttttcaattagatcggctatttccctggtggtcacgcccttggagtaaagcttgataatcatgctttccaagatatccgagtgctgcttgtagtcaggcagcgtgtgctgatgaaattgaccgttgcgatcccgaggcacttgcacttcaattgggccaaattgcgtatcaactttgcggaaataagcaccatttctagagttgccagtattccagccatttctggcatagggatcatagcccagaaaggcagtcaattcagcttctagcaagttattaacagcctgttgtagttctttgcgcaataaatcatttattttgtctggattgaatagagcttgagcaaaatctttggtaaaatcattcatgaaggagttcttctttctgtatgtgttttttttgttcaaaccaatcatacgagaaaggaactcctttttctaatgtttaaagaaataaatttaaggaatcattcatccttacacaaactattttacagtctcaagtttcatatgcaactttgtataaaaatataaaaaatgtgattagtacggtaagtcgcaattcgattattgattatatcgattacgctaaggatgcatatttgttattttccaccaaaaattattttgctaaatttagtgagcgtgaaagcagcccaaagtattattttacagataatggcattttaaatttgttttatctggataaattgccagcattactagaaaatctagttgcgatcaagttgcataataaatatcaagagaatttattttatttaaaatctcaaaagacagggatagatattgatttttatgtaccagctagtaaaattgcaattcaagttgcatgggaagtaaatgatacgtcaaaagaacgtgaagttgggaacctaattaaattagctgataattttgatgaagttgaaaacttaataatcgttactcatggtgaagaggctgaaattcagcaagaagataagataattcagttaatgccactatataaatttttattaatgagatagtttttcgataactcataaaatggtaatgctcaaaattttttgagcattttttataactataagatctaaagagatataaaaatggacataagatctaaagagatataaaattaaagccaacaactaaaataatgaaaataggtgaacatcaattatgtctgaaataacgaatccatttgaccctaactttggcaaagttcccaaaatatatttggggcgacaaaaaatagtagaagatatagtaagatcacttgaaagtggcaccggaccctatcaaacttcaatgatctatgggatgcgcggggttggtaaaacttcattacttgctgatattacctcaactttagaacaaaaagataactggattgttatttacttagccatgacaaatgatttgcttgccacgctcatccaaagtatttatcaagaagcagcgaatccagtaaaaaaggcgttgaacaaaattgatggtgtaaagttttcggcttttggctttgaattggaagttcatatatcaaatcctcaatctacttatcaagtgttacttgaagaaatgttaaaagttttaaaaaagcatcaccaatctttattgatagcaatagatgaggttaaagaaactcctgagattgttaatttggcgtctatctatcaaattatggtgttaaaaaagtattcaattaatatgatgatgactgggctgcctaagaatgtttctgaactccaaaataatgatgtattaacatttcttttaagaagcggtcgtgtaccattaggaccacttgatcttttcgatattaagtatcggtatcaaaaagcatttgaaagaggtaataaagagattaataatactgccttaatgaaaatgactaagctgactagaggttacgcttatgcatttcaagacttgggatatcatgtttggcaacattctactgatcaggtaacagatgaaagtattgaaaattcgatctcatcgtttaaaaatgatctgtttcgtaatgcttatatcaagattatctctgaattatcgccagtcgatcgaaaatttttattcatcatggctcataatgataaaaatgttgttaatataagtgatattcgcaagcaaatgggaaaaagttctaattatatttcgcaatatcggcagcgattaatggatagtcaggtaatcattgatgcaggatatggcaaagtggcattttctctgccattcatgaaagactttttgttagaagcagaagaattatatgaaattgataattaacgaaaaaagctgctaattaaactcttcgctttcgtccaccaaacgtgtaagcaataagccgaagtgaatgacaagatccaggttaacagcaagattccaaagaaagttaagaatgggtggtaaatggcgtgatattgcatgttaagaccgcgccaaactaattgattccagaagacattggataaatatgcgcgataagcataagtagccaagaaatggaatacttttaaactggtttgcgaattttttctaacttgatgcaggcaaaaagctgaaatcagtgcaattactgctaaacaataaagagtcattgacggcttgtaatatggtgcattattgaagttgattggataaccgaacttgtgcaactcaacattagtccaaatgaagcaagcaataaataatatggtaattacccaccaaaacttagtgaccagctggttgtaataaccacgcaatcgccatgctaagacaccatacacaccatagatgaagaatgaaataaaaatgcggtcgagtaaataccagtcatgttcgtgcatgccatggaagacattgtaatcatagaaccaaagccagacaaaatagagtacgaaagtgattactgcaatccaaatacctcgagttagattgtgtcctacatagcggcttaatccccagaaaagcggcattaaaatgatgaattgcaacatcatcgtgttataccacaagtgcggggcggcgttcccattaatgaattgccagcagaatgaaccaagattgttaaaatggttaacttgttgcagccatggcatccctactaggtagattaacgtccaccaaatagtaggtacaaaaagattagaccaatttgtctgcatatgttttgcataagaaaaactatttttttcattattagtacggattgtggtatacaaaataccaaaaataaaagctggagccgtatatttgactaaattataaaaaacgccaaaaacatcttgtgtgtgaaccggttgttctacgtccatgaccagcgacataattggctgtgagattactgcgctgcaggcgaatacttttaaataatcgccaatatcagctatttgatagcttttaaattgatctgttttcatgaacttgctctcttcttttcctaatattattgtgtcatttttttaaattaggcgaaaggataatcatgttaaaattagtttagctattttggaaatggggtcaaaatgtcagtagaaaagatcacacaaaacgcactaaaagcattgctttatgaagtagttaccaatcctaagccaggtttagtggatccagttgacgtggggtctcatcctgatatgaatgtgtatttgtttattaatagcagtttgagtttagaaaattattttcggcaagcagctaaaattggagcagattttacggggcaggatttgcggcaaatgtttgaacaattgcgtcaagctggcattgaggcagaaaaagcaatgtttaagacaacgcataatataaatacccataaaggcgcgattttttcgttagggttgtttggctgtgcaagtagctattgtgaaaataataatcaaggtgaatttgaagtgatccagcagatgactaagggcttagtaaagcacgatttaggcaagaggaatgagactgctggagaaaaacaatttttgcaatatggtaaaggtggagttagagcagaagcagaagctggttatcctttggtgagggatgtagcactgccatttttagctcaaaccgaaggtgatttgaatgttcgtttactcgatacgttgatgaaaatagttagtgcgattgaagactcgaatttaataaaaagagcgggaaatattgaggttgtttcttgggcacataatcaagcaaaaaaatatttggcattaggtggctacggtactcaagctggtaaacagtttatgttagaactaaatcagatttttaaagagaaaaattatagccttggtggcagtgcagatttattgattattacaatttttatggcgttgcagcgtgggattatttaacgcaaaaattgtctagttaagaactagacagtttttttgctgtgtgtcgggcatggcatttgtttagtctagtgaaagtctagatcacgggtagttgtcgccaagtgtagcgaaccacaagccgttagcggtgacgctatgggtgaaggaagtggctagcgagttttccgagcctacgtacagaaacctggtcaggccaaatggtggatgagactgcagcacaagttaaagtccaaaggacaaccgtaaaaccaagacggtaaaccagggggcagtggaaaattaaagatgaatgtcttaccccgagagatctcgtggacaggtgaaaccgagtaagctttaatatcagcgatcgtaagcctggtcgaaaaaggttaatcgcgagaagtcagctgaggtcgtagtagtgctgaaggttttgtaatgaaactggagcgaagggcctaatgtttgtaagagcatatctcgctataagcaatgttcagacagtccggataagaggatagcctagcacaaagagaacgtaactctttgatggtgaaagcaattgggacaattctgaataaatttacaagtagaaatggagatatcacgagatggaactaattgaacagattttaagtcaaaataatctcaaggaagcaatcaggagagtcaaaatcaataagggagcgcctggtgtagacaggagaacagttgatgagcttgatagctattttaaaaagcatcaagtagaaataaaggacgccatcatgaagatgaagtatcgtccgcaagctgttcgcagagtctacattcctaaagctaatggtaagaaacgtcctttaggaatacccacggttgttgaccgagtaatccagcaggctattgcccaagtattaatgaagatctatgatcctcattttagtgagcatagctatggctttagacctggacgcagtgctcatgacgctattgaacaagtcttggaatatttaaacgaaggctatcaatgggttgttgacctggatattgagaaatactttgacacggtaaatcatgataaattaatttcaataattagagagcaagtaaatgacaaaaccaccctccatttaattcgagcctttcttaaagctggagtaatggaagatggttgggttaagcctaataaactaggtgtaccacaaggcggccctctttcaccaattctatccaatatctatttagataaaatggataaagaattggaacaaagaggcctgcgctttgtccgctatgccgatgactgcaatatctttgtcaaaagcggtaaatcagccaaacgtgtgatgaattcaatttcatcatggctagaaagaaagctattcctaaaggtcaacgcaaccaaaaccaaagttgtacgaccaaccaagagcaactttcttggctttaccttctggaaaagtggcgaatactggcaagcaaagccaggagatgaccgcaaaatcaagctttatgacaagatgagagaacttctctgtcgcagaaaagcagctgctcagcctctatcactagtctttactaagataaatcaagtagttagaggctgggtcaattactttagagttggcgacatgaaatattttctaattaagttcagtcaatggctgcgtcataaagtacgggtggtaatcattaaacaatggaaactaccaaaacgaatatacattaacttaatgcggattaacaaggcactaaagtgcaattttagtgatgaagatattcataaagtagctaatacgcgcttaggttggtataaaagaagtacgggtcatgtcattaactttctgcttagcccaaaagtattgggcataagcaaagcggatcgcccaggcttggtcgatccgctagaatattatttatctcgtaaataatcacaaacgtagcgccggatacggaaccgtacgtccggtgcaatgagaggggcgagttataaaactccctctactctattttagatttaaagagatttaaaatgaaaaatccttttaatccgacttttggagatataccacaaatttttttaaaagataattcggataatgaaactaaaaatgtagattcaattttctatttaggtttagataccgagtattgaaaaagcattaagctattgcagatagcttaatgctttttttactatttgattagatctcttataatccaaatgcaattttgtataataatgcaccacagattccacctgcaattggtgcaaccactggtacccaactgtaatcccagtgggctgaacctttgtgtggcaaaggacataaagcataaacaattcttggacctagatctctagctggattcaaagctggtccagttggcccaccaactgccataactaaagcagtaattaagaaaccaaccccgatgttagcaatgtcttcagattgcttgaagaacatgccacgatataaaccaactgcgatgaaaagcaaaatagcagtgccaaagaattcggtaataaaaccgttgaacttactgttagccgaatcaccagtcgcaaaactggcaaaaacagcatcatcactagtggttctgccaatgtaaggccagtagacggctactaagattagttgtcccacgatggcaccaagcatttgtaccaagatgtaaggcattacttgatcccatgggaagacgcctgaacaagcctgagctaaggtaacagcagggtttaagtggttccctgaaattgaacccaagagcatggctgggagcattactccaaacccaaaaccgaaggcgatcaagagccacccaccattggcttgaccgtcacggctattaccaccggtatcacgtagtacagaattggcaactgatccgttacctaaaacaactaaaataatcgtaccgaaaaattcggcaaaatacttcattaaccaagtatgttccataatagatactttcttctcctttagtagaaaaaataagtgaaaaatagtacaaccaaaaattatactcttaactcgaaaaatagatatagttttttgtaaaaaagcaagaaaatagcattaaaaaacactaacttttaaattaattaaaaagatttactatttggctgcaatcatcacaattttataattatccagcaactcaataaattagaccgttccaaatatgaacattatttaacaagccctagataatgccaaatctacttttgacaaataaatgcataatcattatattaatttcacaaatttggtatatagctttatatatacttaatatataactttaagcgctttcaaaatattgtggtactatacagttgttcacaattaatatgcataaaaggaaagagagtagcagttaatgagaacaatatatttggtgcgacatgggcaaactttgttcaatgtgcatcataaaatacaaggtacttgtgattctcctctgacggaattagggaaagcgcaggcgacagcggtgcggaagtattttttgcaaaaagaaattagttttgatgccgcattttgctcaaagcaggaaagggcaagcgatactttagaaattataactgataatcaattgtcttatacgcgactgcgtgacctgcatgaaaaatctcatggtgaatatgaaggacaagatgaattcatgttgccatggcgacgtggctttagccgtattaatgccgcaatggagccggatcaacatgttgaagaaagaatggaacgagcgatcactaaaatcattgattcaacccatgccaacgatacaattttgattgttggacatgggacggctttaaggttatttacgcagcgagtaaatccaacttttaaagaatatgataattgcgggatagtaaaaatgtctgctgttgataataacttgaaatatttaagttatgtagcacccgctaaagatgggttttgagactgtaaaatagtttgtgtaaggatgaatgattccttaaatttatttctttaaacattagaaaaaggagttcctttctcgtatgattggtttgaacaaaaaaaacacatacagaaagaagaactccttcatgaatgattttaccaaagattttgctcaagctctattcaatccagacaaaataaatgatttattgcgcaaagaactacaacaggctgttaataacttgctagaagctgaattgactgcctttctgggctatgatccctatgccagaaatggctggaatactggcaactctagaaatggtgcttatttccgcaaagttgatacgcaatttggcccaattgaagtgcaagtgcctcgggatcgcaacggtcaatttcatcagcacacgctgcctgactacaagcagcactcggatatcttggaaagcatgattatcaagctttactccaagggcgtgaccaccagggaaatagccgatctaattgaaaagatgtatggcagccattacagtccagctcaggtatcaaatatttccaagcagatgattccaaaggttgaggcttaccacaaacgcaagctaagcgacaagtttttctgcgtctatttggatgcgacataccttcctttgcgccgagaaacgtttgagcgtgaagcagtctatattgccattggcattaaacctaatggacataaggaagtcattgactactgcattgctcctagtgagaacattgaagtctggacagagatgcttcaaaacatgaagtccagaggcttgaagcaagttgaactctttctttctgatggtgttgttggcatgaaaacagccttggccaggacttatcctaaagctcattttcaacgctgtttggttcatgtcatgcgcaatatctgcgctaaagtacgcgtcgacgatcgtgaaaagatcatgaacgaattcaaacaggtgcatcaacagacaaacaaagaagaagccacagctgtcctgcatgacttctataccaaatggggcaaggtttacagccatgttatcagaagcttgaaagacatagaaccagatctgctggtcttttataactatcccaagcagatcagagcttcaatttattcgactaacatgattgaatcatttaacaatgtgatcaagcgcaaagctaagcctaaggcagagtttccaactgaacagtcgcttgatgcttttattggtattcaggcaatgagctacaatgaccgttatttcaatcgaattcataaaggctttggtcaggttcaggacaccttagaatcctactttgattaaataaataattaaaaaatcaatttacgagaaagaactatttacacaaaagatttgacagtttcgtggttttaaataaagcagctaaaaatgaaatgttagttgtgcgttaacgaaaagagaacaagcatgaatagagataattatattttgtggtttgatcaattgcatcgcgatgatgttgatttagtcggtggtaagtcatcctcattaggtgagttgacttctgaaacgaatgtcccggttccgtatggttttgcgactactgccatagcttatcgccactttatgaattattctgatttaaatcaaaaaattgataaattattggccactttaactgatccagaagattctgagcaattgcatcgaatttgcaccaaaattagaaaattaattatagaagcgccgatgccaaatgatttagccttagaaattagctgtgcttacgatagcttagcccaaaagatgcaccaaaatgagccattcgttgctgtacgttctagtgcaactgccgaagacctgcctgatgctagttttgctggcgaacaagatacttatttaaatattcatggtcgtgagaatgttttgaaaaaggtgcaagaatgttacgcttctcttttcaccgaccgggcaacttattaccgaattaaacaaaactttccacaagaaaaagttgctttatcagctgcgattcaaatgatggccttttctaaagcagctggtgtgatgtttacggtcaatgtagcaactggtgatgacactaaggttatgattgaggcctcttggggactaggcgaatacgtggtgtctggaactgttacacccgataactatgtagttgataaaaatacgatgaagattgtacacaaaatggtgactaaaaagccaattgagttgatcagattgccatcgggaggaacaattgaacaaaaggtagcaccagatcaagtgaataagcctgctttgactgatgcgcaaatcattgaattagctggttatgctaaagaaattgaaaaacattatggctgctacatggatatggagtggtcacttgatcaaaatgataagttgtggttagttcaagcacgcccagaaactgtttggtcacaaaagaaaaagcaggagaaaaccgatgcaccacaagaagcaactacagaacaccgagtattgttaaaaggcttgccagcttcacctggttttgtctcaggcaaggtacatattattgatgatccaaaagatatcaatgaatttaagcagggcgaggttttggtcactctaatgacgtcgcctgattgggtgccagcaatgaaaaaggcggccgcaattattaccaataatggtggaatgacctgtcatgctgcaattgtatcacgtgaaatgcagataccttgtttagttggaacaactagccgtggacaagctgctacgaaaactttgaaaaacggcgagactgtcaccgtcgatgctaaaaatggtgtggtttatgctggagttgttaaagacgcggttaaaaaagtcgatgaaaagccagctgagcctgctgcagttgaatatttcccaccaactgcaaccagagtcatgatgaacttaggagatcctgatcttgctgaaaaatatgcatctttgccagctgatgggattggtttaatgcgcgaagaatttttatggacgacttatattcaccagcatcccctttatttgattgaaactggtcatccagagagggtagttaacgagctagctaatggaatcggtaaagtcgcgcgggcaatggcaccacggccagtagttttacgtttttcagactttaagtctggcgaatatcgcaacttaaagggcggcgacaaatatgagccgcatgaaccagcagacctattaggctggcgcggtgcttctagatattatgatccaaaatatattaatgcttttaaattggaacttgaagcggtaaaaaaggtgcgcgatgagttcggattaaagaatttacatgtgatgattccattttgccgaacagtggatgaagcgcgcaaagtgacggaaatcatgcggacacaaggtttagttagaagcgcagacttcaaggtttacatgatggctgaaattccagctaatattattttggcggaccagttcaatcaatttattgatggttattcaattggttcaaatgacctaacgatgcttttactggggtgcgatcggaataatgatgtgattgctgatctttttgatgaaagaaatcttgccgtcaaaagggcgattaggcacttgataaaggttgctcatcaagatggtaagacggtttcgatttgtggtcaagcaccatcagaatatccagaatttactgaatttctagtcagaagtggcattgattttgtatcagttaaccctgacatggtgaaggcgactaagctaaatgtagctcattatgagcagaggatcctccttgatcatacaactggcttaggtaaaaaggatccaaatgaatataattggtaaaatacgcgtggtgctagttaaatcgttttagttaataaaaaagtccaatcttgttagactcgacttgtaaatagtaataatagaaaagagtctgatctgattgaactgccttaagcttaagcgttttagccaccatttacaagttagttttaaagatttagtgataatttgtcggcactggtatcgtttgtatgcaccggctgagtttactcatcggcgaaatattgatcaaattaaaactacggacagtctgattttggctttacttatctggcaagctaagacaggaattgaatcacaaagaagattctgtgaatgtttcaattgtttatcacactcacgttttaatcgacgttcacgtcagctattgcaattgatttatcagatacggcaagaaatgaataaaaaggttgacctgaatggacatttcttgatcattgacagctttccggtacctgtttgccaaccaattcgcaactatcgtgctaaaatttttcgcggttatgccaacattggttataaggccaccaagaaaatttacttctatggtttcaaagttcatgccattgttagcgatgacggttacattcttgattatgtcgtaacaaaggcatcagttcatgatgccagggagacagttgaactgatagaaaatacccatccatctaattactatcttcttggcgacgaaggctatttaggcaaagaactgcatcaacagctaaaacaaatgggttacgaactttggacaccatatcgtaaaaatatgacaggagctaaaaagcacaatgatcatcaattgatggctattcgcagaacaattgaaagcgacttttcgcttctgacctattacaatgccgagaacaatcgagcacgtagtctgataggctttcaaagccggttggaaattgcaattttagcttataatttggcttattgtctagaacgatttaactagcaccacgcgtggtaaaatttataatttgatgaaaagtctttgattgcagtattgcagtcaaaggcttttttagagttcaattttgtttttgggcaattttacatttaatttagtaaaagagtaaggttgaactaatgaaatttcgtaagcatctaaggctaatctctcactggcaaaatcagggttatataaaggatcgcctacaataggacttcctaaagaggcaaggtgaacgcgaatctggtgtgtacgaccagtttcaagcgtcaatttgacaatcgcagtattgtcatcatttttttgtaaaacttgataatgagtaactgctcttaatccagtaggatcgattttgcgtttgcgttgatcaagtggatcgtgaccaattggggcattaatcgtacctctttcagctaagtgatcagcattgataactttagctaaataatcgcgatgaaaaattttgctggttaattcacgatttaaaataggtacaactgcaggatttttagcaattaaaagtaaaccaccagttaacatatctaatcgatgaacaatatagggactctgaccaagataagtagtacaatcgttcagagcagtattagtttcatttagattagggtgcgttttttgcccttttttcttattaataattaaaagattatcatcttcatagataacatcgggcatcttaccgcttggtgcataagcctgttgatcactttcaacatgatccaagttaatttcaattttatcaccaggtaaaatgttttgattaaaatagcgatagttgccgttaactaaaatattttgttcaattcgcaaaaaatgacgccacttgcgagggattaaaagttgacgtagtacttcattgacagatgccggagcaagattttctgggtaaaaaagtgtaaaacggaaactcataataatttcttaagtctaatctagttataaacacgtgttttgatagtatggtacaattttcttgtttctaaaaaggagcaatatttaatgaataacgaccaaccaagaagaggtggctttaaagatgcttggcatcgatttgatagtcgcttctttatcggacgctggattattttaatcctgctcacattgatgctcttaacttgtacctattatacaattaaagttaagacatcaaacatagctaatttgaaggcttcgctttcaaccacaactacaatctatgactacaagggtaaaaaagcaggttctttatactcgcaaaagggatcatttgtggaatatgaccagatttcgcctaatattcaaaatgccgtaatttcgactgaagatcggactttttggaagaacccaggttttagtattaaaggcatggcgcgagctactttaagtttagtgattcatcacggtcaagtaactggtggtggttcgaccttaactcagcagttagccaagaactcgcttttgacccagcagcagactttttcaagaaaattggaagaactcttttttgcaattgaaattaaccatgtttactccaaaaaagatattttaacgatgtacttgaataatgcttactttggtaacggagtttggggcgtgcaagatgcaagtcgtcgctattttggcaaaaacgcaagtgaacttaatccgagtgaagccgcaactttagctggaattttacgaaatcctagtttttataatccggttgatcacatgtcaaatgctttagcaagacgaaatttaatcttaaacttgatggtggataataataagttgacagcggctcaagctaaaatgtatcaaaagcaaggattaactttgcggaatacttttcaaaataaaaacggctatcgctatccttacttctttgatgctgtagttgacgaggcaatctctaaatatggcttaactgaagaacaagtcatgaataaggggcttaaaatttatactactttaaatcaaaattatcagggtaaattgcaggatacttttgagcaaagctggcttttcccacaaaatggtagtgatggaactgaaagccaaggcgctagcgtggcaatggacccaagtactggtgctgttcgggcaatcatcggtggtcgcggtaagcacgtcttccggggttacaatcgtgcaacgcagatgaagcggcagccagggtcatcaatcaagccgttggcagtatatgccccagctttacaaaatggctatcactatgactcgcaactatcgaacaagttgcagaaatttggtaaaaatggctatgaaccgcataatgtggacaatggctattctaatacaattccaatgtatgaagctttagaacaaagtaaaaatgtgccagctgtttggctattggataagattggtgtaagtaaaggcgtgcaatctgttgaaaactttggaattaaggtaccaaagagtgaccgtaatttagcgcttgccttaggtggattatcttcaggcgtttcgccaattcagatggcacgtgcatattcagcttttgccaacaaaggtaatttgcctaataattctttctttattaccaaaattactgatgcttcgggtaacgttttagccgaaaataataatccaagcagccaccgcgttatttctgaaaatactgctaaagaaatgacgactatgatgctcggcgttttcactaatggtacaggacgctctgctcagccaaatggcttccgtgtagctgggaagactgggtcaactgaagtacctaactcatatggatttggtaccaaggaccagtggatcgtcggttatacgcctgacattgtacttgctacctgggttggttttgaccacactaacaagcaacactacatgcagggcatttctgaaacaggaattacgcgtttatataaggctgagatggaaggaattttgccgtacaccgcgcaaactgaattcacggagaaggcacctaaccagattgtgaagaataatggttctaatgatgactggactaatggattaggtgaaaaaattcaagatggactcggttctgcaggacagaaaatcaatgaatggtataatagccttaaaggcttatttggccaataaaatttaggaggactagatggttaacatttacgatgctgctaacaagttagcagaagatttgactcaaactgatcaatacaagaagttgcaagaagcaattaaagctgttgaagatgataaggatgcttcagctttattcaaaaagatggatgaattgcaaaataagatcatgcaagcacaacaagctggtcaaccactttcagctgaagatcaacaagcttacaaggacttaaatgatcaagttcaaaagaatgataaaattgtttcacttcttacgaatgaacaggggttgtacgatttgcttggtgaagtacaaaaagcttacactaagccaattaatgatctttatgaagatcttagaaattaatattcgcgatgaaatttattcactttgcggatgcgcacttagatagtccatttcgtgggctatcttttttgccatctgaggaatttaaccatatctatcaagcagctgatcaatcattaactaaaattgttgatctggccttgcaagaaaatgtcgatttagttttaattgctggtgatacttttgatagtaatacgccatcaccacgagctcagctattttttgccaagcaaattaagcgattaactgaccaaaaaattcaggtagtgatgatttttggtaatcatgaccacatgaagcaagaagatctgctagttagtcccagtccttactttaaattgttaggcaataatgaaacagtagagcaagctacttttactacggatgcgggttttaactatgacgtaatcggcttttcatatctgaataaccatatcactgaggataaaatcccagaattcccagcaaaaggaaaaaattatacttttggtttaatgcatgctcaagagaaatcagctactgctagtcagaatgtgtatgcaccgtttacagttgatgagttgcaaaacttgaattatgactattttgctttgggtcatattcatgcgagaaataatttaagtagtacgccgtggattgtttatccaggtaacattcaaggtcgccacattaatgagatgggagccaagggatgctatctaggtgagattgatgaaaatagtggtaagactactattgattttaaagaaacagggccaattttatggcaagggacaaaaattaatcttgaaggagctatcagtaaagctgacttacaagcgaaaattattgccaagcttgaatctggacaaaaaacgtactttagtttgacgattgctggtgctcaatatttgagtgccgaagaacgcgatttagttcaggatcttgatttttggcaaactatttctcaatcgctgccatttgcttctcagttagttgatgtgcgctttgttgtgaatactagtttaaagttaaatgacaatgaccaacaagccttccaagctgccaaagaagagttatttgcaccagctgaattcaagcaaattgttagtgactggcaaaaaaaggatccagaagctgctaaattagcggctgatccagactttattgcggcggttaagaatctaacagaagtaaaactaatgagtaaattgaaaggaattaaggatgagactgaaacaaattaagattattaactttgggcagttctcgaataaaaccttcgatttgcctagtgatcaaattaatgttttctttggtgccaatgaagctggtaaaagtacaacggtagcttttattaaacagatcttatttggctttcatttgagaagtaactcttcaccgttttttgaagattatacgccgctagctcatgttagtccgatgggcggtaatttagtttttactgcagctgatggtgaatacgaacttgagcgactctatgctaaaggtgacaagactaaaaagggaattttaaccgtcaaaaaagatggtcaagttgtacctgagagtgtattttttgatcaaattcaaaatattgatggctctttttacgctgatagttttatttttaaccaagaaatgctgggtcaggttaacagtttaagtcaagaggatttgcttgagcgaatttattacttgggagcagcagattctagcaagttgctggaaatgcgcgacgattttgccaaagaaacgggtaagctttttaaaaagacaggtaaaaagcccgaagtaaaccgtctgcttaaggaaatgactgatcaacgtgataaattagcgcagactaaaaatgagtttaatgattatgaacagctgcaccaagattttgtacaaaaaagagcggcattaaacagacaaaaacaagatctggctgttttacaaaaacaagaacaagatttgcatgatttgcaaaaagaaatgggcaattatcagacgctgcttgatttgcaaaaacaggtcaaggatgtcgactttaatggtcaaaattatcaaaaagcccaagatattatggctcagggacgtaatttgcaaaagacgattcaatcggtagaagcgcagttgcagggcctgggtgaaaacgatcagtctgattttacgctagagaagaagctaatccagcagaagcctcaactcttgcagtggcaagcggaatatcgtaattgtttgcaaaaggctgaccaattgaagcaggagaaagagcaactattagctttgacacctgagttaaaaaatctactcaagttgacaccagagcaaattgaacaaatgcaggcagactatcaagctttgccaggtgctgtcaatgagcctgcttatgtaactactaatgacaagctttggtatgttatcggtgcagtgttagcggcattaggtgtagttcttttggtagcgttgggtacagttggtgtaattgcattaattactggactaattttcctagcagcaggatacttaaaaaatagtaaccaaaataagcaaaatgcggcagtattagaaaagcaaaagctggttgctcaaaaacgccaagctttccaaacaaaatatggattgaatcctgatacgctaaacttaaatagcttactaactaatctgaaccaatatcaaatcaaaaagaatgccgcacagactaataataagcaagtaactgttttgaatcagaatgtggctcaactggcctcaagtgtccaaaatgcattgaagcaaccgattgataatgactttagtcaagttttgaacggtttggacgaacttgagacacaaattagtgaaaaacaagaattgcttcaaagaaaatccagcttaactgcatcactaaagcaggacaagcaagatttgaaagaattgggtctgaaattacaggcactttttgcccaagctaatgtggaaaatatggcaggttacgatcagctttatcaagattcacttaatcaggctaaactgaagacgcagattgcggccttgaaggaatcgttaggcgatgatcttcaacagctgcaaatgcagacaaattcaaccgaattagcagataaattaacggctttgactgaacaaattagtactaagaatgcagaaattaatgaacttcagagtcaagttgctcagttgcaagtgcagttagacaatttagctgattctactgcggtgtttaaggctaagcaggatctggctaatacagaaaccaattttgtccagagcagtaaagaatacttggctaacttgtttgcggcaaggtggatcagtcgctcgcttgacttggcatctaatgaacggttccccaagatgcttaaggcggctcaggaatacttagctttgctaacgggcggcagatatgttgggattaatttagataagaagctaacagtagtcagaagtgatggtaaaaagcgcgaagtaaaatacttgtcacgggggactgctgagcaattatactttgccttgaagttagcttttattgagcagatcaaggatgaaattaatttgccaatcttgattgatgattcgtttgtaaactttgatgatcagcgagtcagctatatcgatcagttattgcaaaagattagcgaaaacaatcaagttttaattttcacagctcaaaagaatttagttgatcagcttgggattgagccattaacttttacgaaaggaacacaggatgcttaagagattgttagattacaacgatggagaagaaatggacattgttgttttgattagaaactcacagttgcgtcataataaaaagaataagttgtttttagcgatgcaattcagtgatggctcaggcgagattcgcggtaattactgggatgctaacaatcaagatgcagcaactttttcaactgggacaatcgttgagttgaatggcaaaagagaagaatatcagggtcgccctcagattaggatctattctctgcgcgtggtcggtccacaagaaggctatgaattagatcaatttattaaatcagcgccggaaccagttaatgagatggaagctgaaattaataaatttgtgatgcagattgataatccgacctggacaaaaattgtgaagtatttacttcaaaaatggcatgatcgtttttatgatcatcctgctggtaaaagcaaccaccatgcggtccgcggaggtttagcttttcatactttatcgatgcttaaggatgccaaaggtttggctgataattatgagcaagtgaatagatcgctactttatgcgggatgtattttgcatgatatgggaaaagtactggaactttcaggttctgccgcaactcaatacacgactgaaggaaatttggttgggcatctggttttaattgatgaacaaattatgctggccgctcaggatatgaagatgaatctggagtcggaagatttactcttattgcggcatatggtgcttagtcaccatggccgctttgaatatggttcacccaaattgccggcattgctagaagcggaattattgcaccgaattgatgatttagatgctgcaatttatgcagtaacgaatgccctgcagcatacgcctaaaggcgagttcaccgagccactactgagtcaagatggcaagcgatattatcgaccgatgcacgattcagcgctagataacgcaaaacatttagaataagaaataagcatcactgcagttgatttgcagggatgcttattttgttgaaaaattgaactagagttttattataatttcatagtataataaatctaatttataggggagtaaaaaggatggatattgctgaaattactaaaatgattgaggcggttaaacaaataatagaaaagaatgattacattgatttgccgctatttcagaattctagtcaattaaggttaaaaggaaataattataattttatacttgatttgaatagaaaaggacatagacgtcctaaatgtacttttctattaagggaaaagagaaataaggaacagccattagttagagtagatattattggacgtcctcatcaaaatcctgttggagactttaaatggtcaaataaagtcattccttgtcctcatttgcatagagcggattttccaaaatatggtacatatgtagctgtaccacttttggaaaagaatgaaaattttcaattgagtcagaatgatttaaataacttgtgtgaatgcttgaagaagacattaaagtttttgaatgttgataatataaattcatataattttcgagaacaggaaagtttattttaaagaaaggggggagaacagttaaatatgtttgatgtagagaaaatgaagaaaatatattttgactggatagataaaaagattcaatttgtcccttctaaaaatcaggattatatgactatcactacaccttttttagatatgtacaatgattatatagaattagtgattgcacaaggaaatacatcaaaatatataattagtgatgatgggtatactattaatgagttagggttattagatattaatttaaacagaaaatctaaacgtagggactactttcaatcgattttgattaattttggtgtgaaaaatcagaataatgaattagtaattgaatttgatgacttagcccaatttccagatgcacaaaataggttaactcaatgtatgttgcaagcttttgatttattacagacttctaaaaatagtgttattaagtattttaaagaagatgtaacaaattattttattgataataatattccagtaggagaagatttgagtttactaggaaaaagcggacggaattctaagtttgatattgtggttggacgtacaagaaaaaaaccgcaacaagctattaaggtggtgaatacgcctattaattctaatatagctaaccctttatttagaattattgatgtacgagaaagccaacctaaaacagaattttcagttattgcgaacaatattaatagtcctgtttctagtgattttaagtctgcctttaagaactataatattcctgtttattcttggtcagaaagagagcaatggctttccaaatttaaattggcaatgtgatagttgattaaaggtgttgagctgaaattgtaaataatattagttctagcattaggcaatatggaacatttagaataagaaataagcatcactgcggttgatttgcagggatgcttattttgttttggtgaaaaattgtgtcaataattttttgaacaaagttattgacaaattagctgaagaataataacatgtttatacaattgaaaagcagagatgtttttggatagattagagacttgtctcctttctatttttttattgataaaaagttcaagaggtatacattgatttcctcttggacttttttgatgcattgaattgctaaagatgttataaaaattagggtagggaataaaaatgaaagcatcaaaaaaattaattttagtatcggcagctacgataatgttgactgtacctgttttagcaaataatcatttgtctaatccagttgttgccgcaagtcaagataatacacaaactactaaattaacgttctatattaaccacaatgcctatgtttacaatcatcaaggtaagcgtaccaagagcaagattaagaagggaaagttactaaaggtgactatattgaagcctaaggcaattactaacccaaatcaaagcaggtatttcttcaataatgtattagctggcaagtatttttcgttaccgacagtaagcatcaagaagacagactttgttaatattggcaaaaataaatatattaagccaggcaacattggtagaatctcgccaggaaaatatcaatatgcggatctgtcaactaaggaaattaaggtaattaccaaaaagactgctccagtaactaatcaaatagggatgccaattgctgctccaattaagaagggaactaagcttacagttgatcagaactattatcataatgttgacggcgctgatgattatttgagtagtctggaatattatcggattaaaggtactgataagtgggtcaacctacctgctatcaaaaagtcaactcggattatgccaaataattttgcattagctgcatctactgaagataattatgtcattgccggtaactcaacgtatctctataatattgacggtgaaatcgttgataagagttatttattgattccagatgttaatgttggcgttgatcgagctctttatatttggaacaagcaaactaaacaagctgatctatattatcatcttacggctaacaaaaaattggtctgggttccagctcttgatggaacaggcaagactggtactacgattaccagcaacggctcatatgctcaccaaactaaagatacagcaaatacttttgttaaagctagtgatgtgacaagtcaaaatccagttgcattaaaagttgataatacaccgagcgaagcacaagcagatgcaagtcaggccactgctagtgactatggtgagttgcaagccttagttgatcgagcaggtcaaattaaaaaatcgactttatatcgtttgactgaaaaagcacagcaagaaagatatgatttggccgttgataacgcacaaaagttattgactaacaagaatacttctattgcggcagttaagcaggctagttggcaaattaaatacgatcaaagtaaattagacggacaaaaagtttgggttaaaaacatgaataaactaactaaggcagaaaagtcttgggtagtttcattggctaattgtgatatccatggtgatttacaaaaagaatatgctggcttttataaaggtaaaattgcggtagtgacttataataaaaagactttcaagagtgaacttgtacgctacttgaagttgtctgattatgctactgataaataaaattaaagagctcaagaatgctttaatgatgaagcatcttgagccttttgatttgtagtaaaaaaatatccaagaccgaaatcttggatactcattggagctggaactgtgcttgatgaggcaactgctagaatggcgattgtttcaggagctagattcgttgttagcccatcttttaacgaaaatactgctaaggaatgcaatctgtatgcggttccttacatgcccggttgctttagtccaacggaaattcaatctgctttaacttatggtgctgacgtagtcaaaatcttcccaggttcaattgctggtaaaggcattatttctgaaattcatggacctttcccatatgttaatgtaatgccaagtggtggtgtatcattaggaaatatgcatgaatggtttgctagtggtgcctatgttgttggtgtaggtggcggattagttggacctgctaaaaatgatgattataaagctgtattgcataatgctcaagcttttcataatgaatttcaaagtattatttatgccaactcagctgctactaggaaggtgccagtgagggcatagtttttttactgggggggaatatgatgcccctattaaaaaaataaattaatgaaataaaaaaacgtcgaatccattcagattcggcgtttttgattaactaaatatatttgttacttagtagttgaaacgtatgatgataatacatccttcaagtcgctatccttgattgaaacgtcagccttcttcaaaacagtagcaataacgtctttcatagtagcttggtcttgagccattgatgcgtaaatttggtcatcgatagccttcttgtgatcagcaaacttacccttagctgggtggctgatcatcttgattacgtggtaaccagattgtgacttaactggagttgaagtaacttcaccagtcttaagcttgaatgctgcagtcttgaatgagctgtctaaagtagtgtcagttgagtcgaatgatggcaacttaccagccttgttcttagtagcagtatcaagtgagtacttcttagctaaaaccttgaagctcttgccatctttcaattgcttgatgatgctttgagcagttgacttcttagcaaccaagatgtgttgaacagttaccttaggttggtagctcttccaagcttgttgttcttgcttcttagtaactttcttaatgtgcttcaatgcttgttcagaaagaaggttagtcttaatgttttgcttgaagcttgaagcagtcataccgttttgttgtaaaacagcactaaattgtgagccgtattgcttcttgtagttgttgtattgcttgtcgactttcttttgagatacgtacttgccgtattgttgttccaaagcgcggttgataatcatattagccaaagttgacttaccggcttgtgacttcttcatttcatcgtagtattgttgttgagtaatcttaccgcccttgtaggaagcaacagtagccttagtgccgctattagaacaagcagcagttgataatgcaacgccagctacagctacgactgcagcaatttttttcatataactcttcataaaaataatatctccacatccttaaataagtaactgttcattaatataccataaaaaagggcgtttcgttttcaaattacgaattttcacagaaaaatcaaattttctttattttttcttagttctttgtgtcttgtgagttagtatctggcacgatgttttccaaatcttggttcaatttatcgctctttttttctatgcggttaacgataggttgaatatggtcggaataatgttcaacactatcattaatatcactaattgtacgttcagctgttggcatttgttcatttaattcttgactagcctttttagctttttgcaaggcagaattaaagcgttggctttcatgtttaattgcttcgaactcatcttttaatggcttgcctgggcgattaccattgctatctttcatacaggaaaaaactagcccagctgttgcaccaaaaactgtgcctaataagaaatgtttcatttttaacctctaaaattgtgccttaattttgttagcaacttcgttgtatttagcttcatcgtatttgtcagcgttgttgcgggtcatcagcttcaagccatcgccttcaaaacgaggaatgaagtgaatgtgtgagtgcataactacttgatttgcggccttaccattattagtagtaatgttcattgcagtaacattagggaaggctgccttaattgcattagcaatttcaggaatatattgtaaatagcgttgtgcgtcttccttggtgtagtcaaacaagttaacgatgtgcttttttggcaccattaaggtgtggcctgggttaacttgagaaatatctaagaaggccttaacatcgtcattttcaaaaacggtatagctaggaatttcaccgcggataattttgcagaataaacaatctttgtctaaattttccataataaaacctcatatccttgtactttagtttactattaaatccatgctatcataataaaggtataaattcagtaaagaaagataggaaaaatgacattaaaaattgaacatttaacgggaggctacacgggtgtcccggttattaaagatattaatttggaaattaagccgggtgaggcactaggcttgattgggctaaacggcgcggggaagtcaactacgattaaacatattttgggtttacttcgcccgcaaaagggtaagatcagcttgaacgatgttgtattgacgcagcaaccaactaagtttaagcgtgaagtagcttatattccagaaacaccgattttgtatccggaattgactttaaaggaacatttggagctaaccatgttgagttaccacttggatgaaaataaagcatggaaacgcgcacatgagctgcttaagatgttcagacttgatgacaagctagaatggctgccgattcacttctctaaggggatgcggcaaaaagtaatgattgtctctgcctttttagcagatactagtttgcttgtaattgatgaaccatttactggccttgatcctttggcagttgctaacttaatcgatttaataaaaaaagcaattgctgacaaaaagatggtcttaatgactactcacgttttagctgatgcacagcaagcgatttcgaattatgctgtgttaaaccgcggcacgatcgaagttgtggggagtttgcaagaaattcgtcagcactatggccttaagccagatgatccttttgacaagttataccttgctttgaatagagaggataatggcaatgcgtgagttagcgaatagaaggttgagcgagaatcttaaacaatcagtaaaatatttgacgctggtgtttaatgacttctttattttagcgttgatctttttgtttggggcgctgatgttctggtatgcccaagctatgcgcgtaattcccaataatctgtggttctataagccacttgtcggctttatcatgtggttgccattattagctggtcgattagttaccttattaaaagaggccgacatgcaatttctgtttacgcaagatgaacaaatgggtgaatatctgaagccgatgattcgttacagtatggtgctgccaacaattctgattgttttgcttggcggaattctgtttccgtttgcgacggtaaaggctggaatcccagtttggtcatatgtaatcctgattatcagcactgttttattaaaattgtgtatgttgctgattgaaaaagagagtttgtacttctactacaattatccgcaatggatattattagtggtaactctggcggctttgttgattggctcactaggatcatttatttatccaattgaagttgtagtattaatggtaattacgcattttggtactaaaaaagaaaagggcgtctttaactggcgctatgcgattaaaactgaacaagctagaaaagatcgcgtttattcaatcttcagtatgtttaccgatgtggcagaaaagcaagttacaatcaaacgcagaagatacctcgactttcttttaccaaaatcattggctaaggaaaatcctaatttgttcttgtatcggagatcacttttgcgtaatccagaatacttgaacttattagtcagaatgactgtctttgcaatcttggtatcgtggttagtgcaagattggcgttgggcactaggcctttcatgcttggtaatctttttaacggtctatcaattattgccaatggcaacagagtttgaccgcaacttcatgtaccgcgtttacccaattgaacggcaaaatcgtggcagggacttggtagaggtgttgacaatgggcttgtttattcaatggctcttgattagtgtctgctggttaattgtgctaccaattaatgttaacttgtttgaagcgatggcaattttacttggtttcactatgattgtaactgccacttacttgccaggcagagttaaaaaaatgaatcaaaaaaattttggaattagataggaatagagaatgagattaagaaataaaccttgggctgttaagcttgtaaacgaccatccagaaagtgttttgcaaaatcctgatcctgaaaaaaagatcgactggactgaacgatttggtaatgatcatcccatcgaaattgaagtaggttctggtaaggggcatttcattactacgttagctgaacaaaatcctgataaaaattatgttgcattagaattgcaaactacggctgcggggattatcttgcgaacaaagttggaaaagggcttggataatttacaaatcttacgcggggatgcggctgacatcaactgcttctttccagcaaatagcaccaatgttatctacttgaattttagcgatccatggccaaagactcgtcatgaaaagcgtcgtttgacttacaagagttttttgagcaagtatgaacaagttctgaagccagaaggacatattgaatttaaaaccgacaatgcgggcttgtatgcttactctgttcagagcttgaataattatggaatgaagtttgattttgtttcagttgatcttcatcatgaaaagccagagattgtggaaaagaatattgaaacagaatacgagcataaatttgcagctaagggtaatccaatttatgctttgcacgctcattttgaggatgaatagtttgaagcgtctagagttacagcagataaactctaggcgttttttaatgctttattggataaaatcttgctactagctcatcgctttagttattttgttttagaatagaactgtaagatttcagattattggagggaaaattatggaagataaaccttattatgaacaagaatatcacgaacctaaaactgatattcctagaccaacttttggacaagcattcaaacttttgtttactgcaccatttaagtagaatgcacgtagtactcgtcgtggattttggtatgcctatgtttgggcaattattttgctagtcattttagcagcatgttcagctacggcatattcaattgatggcattgcttattcaagtaatgaattcttcttattaacgcacgtttcaactggtacacttattattcaaataattatctatctactgattatttggatcttattaggcttacttggctttaccataagaagattgcatgatactgaccacaccggttggtggtactggatctcggttattccatttgggtatttgtttttactttacttcatggttttgccaactgttgaaaaaccagttcgttggggcagttatctatttaaagaaaagaaataattgtaagactcaatttctagctttttagttaaagaatggttataataatatcaacttataaaaagtaagaaatacatgaggtatgaaaaatggaaaagattaaagaattaactgaagatcaattaaaggaaattactaaagaaggacgtactgtgcttgaattctcagctgattggtgcccagactgcaagtttcttgctccatttatgcctgaaattgaaaaagatttttctgatgcaaaattctacgaaattgaccgcgacggttcaattgacatagcaaaaaaattaatgattatgggaattccttcatttgttgtctaccaagatggcaaagaaattggtagactagtaaataaggaccgtaaaactaaagatgaagtggaaaactttttacgatcacttgactaatagaggagaaaaaaaagcatgattactagtactaataaagaagcttatcctaacactttgatcgttatcttaggtcacgatgaaggccgtagctcatttgaggaaaaagaagacgttactcgcgtaactaacgatgaaggcaagaccattggttacaacttcttcaacgttgataagttagttgactttgataagttaccaaatggtccagttaagttgtcagacgatgagcttgttgcactgaacaagaagcttgatgaagttggttttactgacaagttagcatatggcaagccaactttagtttatggctacgttaagacttgtgaaccacaccctgattcagatcacttgcacgtaactactgttgaggttgctgatggtgaagaacaccaaatcgtttgtggtgcaccaaatatcgctcaaggtcaaaaagtagttgttgcacttccaggtactttaatgccaaatggtgcacaaatttggccaggtgaattgcgcggtgttgattcatacggcatgatttgttcagctcgtgaattaggtttgccacacgcaccacaaaagcgcgggatcatggttgttcctgatagcttcgaagttggtgcagaatttgaaccaactaagtgtgatgaattgattgctagtggtgaaattactttataatttgaataaagcaaaaataaaaagttaaccagttggtgcaaaaaagctaattgatcaacttttttattttgtctaagaaaagccaccagtttcaccttttaaggagctagtgaaccaattttgtgggaaatagttttacccgtaaggtctttaatgatcaaatgatcgacagtattaacataattgtcgttttcatcatagatttcttttgattttaaaaattttagcataagaaaaatggtaaaataattaacgaataaaaacgttgaaatttcgagggacaaataatgttagataaaaataagcaaatttggtttattggaatcaagggtactggaatggcatccctggcactgcttttacatgacttaggctataatgttgccggcagtgacatcgagaaatacactttcacccaagttccacttaaaaaggttggaattgaagttaagaattttgatccagctaatatcaagagcaatgctgagcaagtaattgttaaaggaaatgccttcaaggaagataacccagaagttaaggcttgcttagacaaagatgttaagtggcagtcttacccagatactgttgaagaagttgttcaaagtcatacttcaatcggtgtttctggtacgcacggcaagacttcaactactagtttgctagcccatgtgctcggtgaagtcgctccgacctcatacttaatcggtgatggtcgtggtaaaggcgttgctggttcacgtttctttgtatatgaagccgatgaatatcgtcgtcactttttggcatatcatccagattaccaaatcatgactaacatcgactttgaccacccagactacttcaaggatcaagccgattacaccagcgcttttcaatcagctgctgatcaaactaagaaggccttgttcgtctggggtgatgacaagcgtttgcaaagtttgaagaccgatattcctaagtacacttatggctttaatgatactgatgactttcaagctactcaaattgagaagtcgactactggttctaagttccacgttttggctcacggtaaggacttgggcgaattcgagattcacctctttggtgaccactcaattttgaacgccactgctgttgtggccgttgcttacaccgaaaaggtgccaatggaagacatcaagaagggcttgccatcattcaagggtgctaagcgtagatttagtgaaaaggacttcggcgacattgccgtcatcgacgactatgcacaccacccaactgaaatgcgcgccactatccaagctgctcgccaaaagttcccagacaagaagttggttgttgtgttccaaccacacactttctcaagaactaagaagtatcaaaaagacttcgaagaaatcttgcgtgacgttgataaagcttacgtaactccaatctatgcttcagctcgtgaagctaacggtgatatttcaagtgaagacttggttaagaatattcctggctcagaagtaattgacttagacaatattgctgacttgactaagaataagaattcagtcattgtctttatgggtgcaggtgatattcctaagtatgaagatgcttttgaaaaattgctttaattgaaagataagcatgaaaaaaactgttctcaataagagagcagtttttattttggctaatctttgattttatccttgagatccaggctcttttcataaataaagtaaccgatgatgcaggtgatgatatcactggctgcttgagcccaaacgataccgtggtagccaaatgtgacttttagaatttctaatgcgataaagtagacaacgccttggcgaacgatggccatgataaacgctgcccatgcattaccaactgattggaagacggtagtgtaaactaaaatgataccaacgattgttgtggtaataatagtggcaattaacatataattaccagcgttaacgatatctggttgattcataaatagagcggtgactggacgagcaaataaaattaataatccgcctgaaattacagcataaacaacttgcacaagaatatcgaagtttagaattttctttaatcgtttccagtttttagcaccatagttgtaaccaattaaaggttgtgaaccaaaggcaaaaccaacgattaccaagataacgatactgtaaatcttttgggtgattcccattgcggcaactttgtttgcaccgtatagagctaaagatgagttaagaagtgccatgccagagctttgagcgaagttggtgattgaaccggggatgccgattgctacgatatctttgattgttttgccgctaattttgctatattttagctttaatttgatgtagtcagttttgtataaaacgtagtaaatgagaatagcatcagtgactagataacctgtaacgttggcaatcccaacaccgattgcacctattttgaaaacaaacaagaaaataggatcaaggatgatagctaaaatggttcccgtcattgtagcaaccattgcttgggtagctaaaccttctgttctgattaagttctgcggaatgattgagaagataattggcgcagcaccaattgatattacacgataaaaatcggcagcatcttgataggtggcagcttttgctcctaaaagatgaaggatcggattttctaaaattagtaaaatggctgttagtattaaaccagtaacaaatccaccgatcatacaaaaactgcttacacgtttacttaattgataatttctttcaccgaatagccgtgaaattagtgaagatccaccgagcccaaaaatgtcagaaacagcgattaaaaaagtaaaaagtggagcaccaatcgtaattcctgctactagatttgtatcacccgttttggcaacaaacatcgtgtctgccaagttgtagatcatggtagtgatcatccctaagacgaccggtaatgctagcttaaagtagaccttttaatcggcgctttagcaaataattcatccataaattttccccccacattgaaaaaagcgacctagaaagatactttgaggtaaacctcactattctaggtcgctacgttatatcatttatttaattttagcatattgtgttaatttgcgaggtgattatctaaattaaagttaccttgaaattcatcagtagtgctttcttgatccataccatattcggcatcgtcgccccagtaaatgtattgtgcgtttttacctttggtgccagcaattctgaagtaaaggccagcttcatcaccttcaccagtggtcttggtggcatctaccttaactttttgaccaatcttgagcaacttgctggttgatttaagcttattattcaaaacatggattttgtttaaaatagtggcggtagtggtgccagaagcttggtaaagggtgttgccgttgacaaagccaacatttgaagcatagatataagcgccattacctaaggcgtagaatggcttacccttgatagtggttgtgttcaaacttctctttttagacccgctaagatttgagaagtagtaaaatacgtcattcttagttgtggcgtgggttttagctggtgttttaactaacatatatttagggatgagtgacaaaccattgaaagtagtgcggtgaccgtttttatcataaatgcgagagttggaactcaagattaaaacattttgtccatccattgagctaacattcaaagatttgatgtagcgttttttaccgatgttaacgtaagaagcggtagtgtagtggtagttcttagaagtttttgcatctacttttttaccttggatcaggataggcttgccataatatttaaaacttgagcctgatttaatcgttgaagcaacagtcatcttcttgccattgactttttgggtagtggtagtggcattgcctttgctgttgaagacttgaactgtgccgttaaaggatttcttgagagtaactttacctttttgtgattgcgtagctgcttgaactgtgtgaacaggttgattgataatagcagctgctggtgcaacactgattaataaagctgctgcgatagttgctaattttttagtagtcatattttgtctcctttgtaataatcccttaagttgattttagcacttatgagactataaaaataacctcgaaactcaaacgttttcggggttatttgattttattcacttaagtacttaggatcaataaatttattgatcacgttgttaaccttctttgaattattgtacttgcggataatgttcaagaagtcttgtgcagttgcttgcttcaagcagtaagtttgatagtaatcgtgtaaagcatcgaagaacttgttttcgcccatggcaacctttaaaacagcagggaagtccatcccaagttcgtaagccatgtcttcagtgtcaacgccctttggtggattattaacagggtagttgatgtagttggccttttgattcttattaatgaattggttagcattttcttttaagattttgttagcacgcttgacgttcttacgagtatagaacttgctgtgcatcagtttagcacagtaagccttactcttagtgtaggtcaaatcgtaaacgccattttcaaggatgttggtaagaccttcgtcaagccaaggttccatgtattcgtcgctgccgacagtgccgtagaaccattggtgaccaacttcgtgagaaacatcttcagttaattcattatatctatcaagtgggtgcttctttagtaaaaagccgctggcatcgatcatgatcaagccaggatattccatcccaccggtatctttgctaagcaagccttcagtaatatcgatttctttgtaaggatatttgccgatctttttggtaaaaatgtgaaaactgtcttgggcagtcatcaaagcaagcttgttgtattgcttgctgtttttgcttgcaaggtagtagtcgttgattcttacgccgtttgcataagcgtggtcaatcttgaacttgttggaagtagcgattgcgaactcacgcatgttgttggcggtaattgtagttttgccatttttggttgtgctttgaccagaagcggcaactttgtagctctttggtgcgaagaagctaacgtggaaattgcttacagcactgttgcggttttcaccagcatcgtagtatgggtgataattccacttaccgttgcgataatcgcttaagtatgggaaacagaatgacaggttataaaccttaccgccgttgatattttggtagccaaaacgatcttgtctcttaggcacgccggtaactacgttgacagttaaatcagtagattcacctatatttagacttttgttaacaaataaattgctcttgtctttaccggtagtgtaagaaagcttttgaccatctgatgaaatgcttttaactgaagttgtcgcatttcttgtagcctcaaaatgcttgtggtcgtatttcaacacgccgctagcaatatttctaaccaataaatttttaacaggttcattaccgttattaacaacgtgcatggtaactttttctgttaattgattcttgcgagtgtccaacttcacgatcatgttgtaatttgttgccttgatcgtaggatcagccgcagcttgaacttttgagttgaagctaaataatgccgcaatggttactgcactcgacaataaaagtgttgttcttcttttcataattttccctccaagaaaaatttattctaattattggaagttatcagcataaagtcaatctattttttgatgataggatataatttatgtataagtgaaaatgaatagatataaagaaagaagataaataagaatggttaaaagtattacacctcatttgttttatcgcttgaatgggatgcaccatgttgtagcccaagttggtgtagtaaatggtgatcatgtttttgccttgcaacttcttcacagtgcacatgatgtgttggtttatagaaaacatgaaggtttaactaagaacatcgattatactgatccacacttagtaatgatgggctttggccacacgcaaacctgggtagcagctaatgacaaggatgaatatttcgtaggtgctaaaccaaattcaggcaactggactactcaaattgcacgagtaaagtacccaagacttttaccagaaagatatacttcaaatacacaacttccacgtttgtcacacttgaatcacgtaaccgacgttccttatgatggtcatgatcacttgcacagagtagaagcttcagtttcaccaaatggcaagtacttcatgattgcttcaatttgggatgatggttcaggtcactttggtttgtttgacttaaatgaagtaaaccaaaagttgaatgaaaatggcactaagaacacgccaattactgatttgcattgccttagtgcttttcacattgataactttgatcatccaagcgtggcaccaagtgaagaagctccacaaatgattgattctgttcagggctacgccattgatgatgacaagaatatttatatttctaaccaattgtcacccaagattgatcatgcgaatggtgaagttactacttggtcacgtaagatcgttaagtttccatggggtgaaactaatccagagaactggcaagtagcaatgattgatggtattgatttgcctgatcgctacagtgaagtagaaagtattcatgttcaggcgccagatgacatttatctaactgtggcttaccaccaaaaatatgtcaaagatggcgagtttaagttaagaactttggagaatcaaattttccacattagtgatttaggctaaaattagattcttgagactactgcaaaaggtagtctttttatttttgtaaaaaagctatgcaatttatatgcaaacgatatataatagtggtaaatagaaaggagagggtaccatggctgagaaaacaactggactttatgtcagaatgaatcctgaaaagaaagaaaaagcagaagcaattttaaagcaattaggtttgaattcagctactgcaattaatatgttttatgatcaaattattttacgtaatggtattccttttagagttgagattcctaatgcttgggccaacttggactacatgaacaagtatgagtatgctcatctacttgatgaaaagcttaaccgcttggcagagcagaccgatagttcactaggtgaattagccaagggagtcgatcccaagaagaaggacgagtaatttttagttgaggtataaaaatgggtattgttattacgctaatcgttttagttttagttattgcatatatttgttgtggttttagaattgtaccccaaaataatgaaggcttagttgaaacgttgggtaaatattctaaaactgttaaggctggctttgtctttgtttggccattatttcaacgaattcggaaagttccattggcattgcagccattagaaatttcaaagtattcaattattactaaggataatgcagagattactacttccttgactctgaactacttagttactgattcataccgctacttctacaacaacaccgattcagttgagtcaatggtgcaattaattcgtggtcacttgcgtgacatcattggtcgaatggatttgaatgcggctttaggttcaactaaggaaatcaatgatcaattgtttacagcaactggagatctaactgatatttacggaattaaggttgtcagagtaaacgttgatgaacttttaccaagtccagaaattcaaagagcaatggacaaacaattgactgctgatcgtgagaagaccgctgctattgccaaagctgaaggtgaagcaagaacgattgaaatgaccactaaggccaagaatgatgctttggttgcaactgctaaagctaacgctgaagctgttaaaacacaagccgatgctgatgcataccgtgtataaaagatgcaggatgctttagctaaagctggggaaggctacttcagaaatcaaagcttagacagcttcaatcaattagcacaaggtccgaacaacttgattgttgttggaaaagatgagatgacagatttaggaaaggttccagctttaaagaaagtatgggatgaatctggcagtcaggatgacgctgaataatatggaaaagcacttacgtgcttttttgttttgattactgattgataaaatccttttttgacaaagaatttaattaaatttttgagtaaaaatcgtaattaacagagattcactattttactaaaacaacatgctgaaagattagtatgaaaactggtaaaatagataagtaaaagaatagatctatttgttaaaagggagataaaatggctgataaaaaattacttctaatcgatggtaactccgtagcttttagagccttctatgcactttaccgccaactagaatcattcaagagcccagatggtttgcatactaatgccatttatgcttttaaaaatatgctcgatgtactcttaaaagatgtcgatccgactcatgtgttggtggcttttgatgtgggcaaagtaacttttagaactaaaatgtacggtgactacaagggtggtcgggctaagacgccagaagagttgttagaacaaatgccgtatattcaagagatgctacatgatcttggtattaagacttatgaattaaaagattatgaagccgatgatattattggtacttttgctactaagggcgaagaaaatggttttattactacaattgtaacaggagaccgtgacttgacgcagttggcttcagacaagacaacggttgaagtgactaagtcaggtgtatcacagcttgaggcttatactcctgaacatatgaaggaagtaaatggtgtaacgccaactgaattcattgatatgaaggctttaatgggagattcatcggataattatccaggcgttgaggggattggtcctaaaacagcttctaacttgatccaaaaatatcatacagttgaaaatctgtatgatcatattgatgacttgaaagcttctaaacgaaaagaacgtttgattcgcgataaacacaatgctattttaggcaaaaaactggctacaattgatcgtcattctcccgtgacaattgatattgatgacgttaagcgccaaccaattgattatgaaaaattacgccaattctatgaaaagatgaatttccgtaagttcttggcagaactgaatgctagcggtcaaggccaagatgcaactgaagtagaaaaagttgaatacacagttcttgatgaccaaaatgtcaagaaaatcaaagctaatgcagatgaccaaattgaattttatcttgctatgctaggtgctaactatcaccttgctccatttgtcggttttgctttaaaaatcaattatcaaatttacgtttcacgagatgttgaacttttacaagagactaatttgcgacatttattagaagatgagcaaattaagaaaaatgtctttgatttaaagcggacaatggttggcttacatcgattaggtatccatgttcacggtcaagattatgatatgttgttagcttcatatttgatcaataatgaaaataattccaatgatctaggtgaaattgctcacttgtatggtgattattcagttaaaaccgatatagaaatctatggaaaaggcaaaagtgagcatgttcctgatgacgatgaagaactatttaatcatttggcttcaaaggttaatgctatcgaaaacttgaagcagccactacttgagaagcttaaggaacacgaacaagatgacttgtttgatacaatcgaaattccgactgctcgtgtattagcccggatggaaatcaacggaatgaaagtggaggcaagtactctgctcgaactgcaaaatgaatttgctgttcggttaaaagagctggaggataagatctatcaacaagcaggcgagcgctttaacttgaattcacctaagcaattaggtcatattttgtttgaaaaattgaatttaccagtaattaaaaagaccaagaccggttattccacttctgttgaggtattagaccaattaaagacacaaagtccgattgttagtgaaattttagattatcggcaaattgctaagattcaatcaacttatgtcaagggcttgcttgatgtgattcagccagatggtcgcgtacatacgcgttatctacagacattgacagcaactggtcgactttctagtgttgatcctaacttgcagaatattcctacacgaactgaagaaggaaagcaaatcagaaaagcctttgtgccaaccaatcctgatggttacatcttctcttgtgattattcccaagttgagttgcgggtattagcacatgtttccggtgatcagaatatgcaagaagcctttaagacaggctatgatattcactcacatacagcaatgagaatttttcatttagattcaccggatgaagtaacgccattgatgaggcgtcatgctaaagccgttaacttcggtattgtttatggtatttctgattatggtttatcaaagaatttaggtatttctagaaaacgtgctcaagagtttattgacaattactttgaacaatatccacaaattcgtgaatatatggataaggctgtgcaaacggctcgtgaaaagggctatgcagaaacaattatgcacagaagacgctacttgcctgatattcatgctaagaaatttacagttcgttcttttgctgaaagaactgcgattaactcgcctattcaaggatcagcggccgatattatcaagattgctatgatcaatatgcaaaagaagctagatgaactacatttgaagaccaagatggtcgttcaagtacatgacgaattgatttttgatgtgccaaaagatgaattagaaacgattaagaagatagttccagaagttatgcaatcagcagtgaagcttgatgtgccattgattgcagattctggttggggtcataattggtatgatgcaaagtaggtgatttaatgccagaaatgcctgaagtcgagacggtgcgacggactttaactccgctaatcgttggaaaaacgattaaaaaagtagtactttggtatcccaaaattgtggcaacagaccataagaaatttatcaaagaactaccaggtaaaagggtcttaaagattgatcgctatgctaaatatttactgatacgcctaagtgataatttaactattgtgtcacatttacgcatggagggaaaatatcatttaaccactcccgatgcgcctaaggataagcatgaccacgtagagtttatttttactgatcaaactgccttgcgttataatgacgtgcgtaagtttggccgcatgcagctgattttaacaggtactgagcgccaagtgacggggattggcaaactgggccctgagcctaatagcatagaattttcgtcagattattttatcaaggccttgagccgtaagaagaaaaatattaaaaatgtcttgcttgatcaaacaaccgttgcaggtttaggtaatatctatgttgatgagacactgtggcagagtggaattcatcctttgagtgccgcaaataaaattccagcagaaaaagcaaaagagctgtggcagaatattaaccaaactattaaaattgcaacaaaaaagcgtgggacgactgttcatacttatttagatgccaacggaaatgttggtggctatcaagaaatgctcaaggtttatggtcatgcaggtgaaccttgtgcaaagtgtggcacggaactagaaaagattaaagtatcaggcagagggacaaccttctgtccacattgtcaggtggtttattaatgagctatgttttagccttaactggtggtattgcaactgggaaaagtacagcggaccagttttttaaagcaaataaaattcctgtgatcgatgatgatcagattgctcatgatttgatggagcctgggcaagcttcttggcaggcgattaaagattattttggctcagagtatttaaatgatgaccaaacgattaatcgaaagaaattagggcaattggtatttaaggattcgcgggctttaactaaattaaatgagttaacgcatccgttgatttttttgcaaacaaagaaattgctaaatcaatatcaagctcaaccaatagttattcttgatgtcccactttattttgagtcagggatggataagaaagatatagctgacggtgttttagtgattactttgcctgagaaaatgcaattacagcgtttgaaggagcggaatcatttaaccgatgaagaagcaagaattcggatgcaaagtcagttgcctatggtcaaaaaagagcaattggctgattttgtgattgaaaatactggtacaataaaagaactagagaataaactagcacaattattggtaaagattagagaagagggatagctatggaatgtccaaattgtcatcaaaatgcttctcgcgttattgattcgcggcctagtgatgaaaaccgggctattagacggcgcagagaatgtgaaaattgtggttttcgctttactacttttgaacgagtggaaactgctcctttgttggtagtaaaaaatgatggtactcgtgaaccattcagtcgaaagaaaattttgcacggagtaatggcagccggacaaaaacggccaatcagtagtgaacaatttgagcaattggttgatcgtgtcgaaaataagataagaaaacaaggcgttagtgaaatttcatctaagaagattggtcagtatgtcatggatgatttggctaatttggatgacgtagcttatattcgctttgcttcaatttaccgtgagttcaaggatatgtctagctttatgaagacaatggaagatatgatggccaaaaaaggaaagggtaattagtcatgttcgcaacgtctgatcctaagcatctttattatgtagccaacaagattaccctttttccagagaatgagaaaatcttgattaaactgtatcagcctttggttggcgcggtggcaattgccttgtatcagactttgatcaatgactatgatccatatggtattgtttctgattcaaagggaatttattcactacaggagcaacttgattgtagtttaaaagatatgtttcattctttgcataaactggaagccgtaggtttagtgcaaacttttttagcggataatgtcttcaataatatcattgtttttaagttattacaggttcctagtgcagacaaattttttgcaacaccactgctagcaagtttgttgaaagaaaaagttggcagcccaacctttcatgacttgagtcatgcttttgctaaggaagcaaaactgcgtgaaaagccaatcaagaatgcgcgcgatgtctcagccaacttttttgatgtttttcgcttgccaggggatgaagcaattaatccatctaatgaggtagtagaagctgcgcaggaaaataaagcgcctgagatagaaactgctgaaattaatgcccaggatccaattgattgggatctgattaaagatcaatataatgtctatcaaattccagctcaagaagtagaaattaaaaagaaccaaattcggggcttaatacagacatataatttatcggaacaggaatttgtggatgagactgttccctgtttgcatggtacacataaattaaacatgcatgaaattagtaataccatagcagaaaattataaacgattgcatactagggaaaacattcaaaaacaaattgaagaaggcaaaaagcgcgctattgcgactatcaaaggtttggatgctaatgatagaaaactgttactcgaagctaatgaaaattccccatctgaatttttatacaaattaaaaactgaaaagggtggaattgtagctccaggcgaaaactatattattaatcagctgcacacgcagtatggcttgccggaagatttgattaatattttgattcatacctgtttgacctacgatactgttgtaacttctaatcgtgcttatcgaatagctaatgattggctgcaaggtggtattagtactggggtacaagctcttgaatatgtgaagaagcgtaaagccgatattcttaaaaagaaaaatcgacagtcatatcgacaaaataagcgagtcgaaaaaggtaccgattggagcaagaaaaaggctaaaaatgaaggtatgtcaacagaacagctgaaggatatctttaaggatctgaaaaataagtaaatagagggtaggtgaaataatggaagcaattggtgatttgcttaaaaaaatagttaaagagcgtaatttaggtaatgagaaagaactgttgaaaactgctttacacgatccagatgtgcaagcgtttttgcaggcaaatagggaaaaaatagataaggcgatgattcgaaatagtatggccaatatctatgaatattatgcgcaaaaacatagtcagaatcaggtgctggccggttatgctccgcaattatttttaaacggcaaagtaattgatgtacgttataaacctaccgaggctaagattgtagcagatcagcaacgagcagccaagcggcgtcttcatttaattgatctgcctgctaaattgcatgatgttaatttaagtgatattgaggttacaaatgatcgccagcaagctttaaccctgatttatgattttttgaaaaagtacaaagctgatcctcaccaacaaggcctttatttgtcgggcgactttgggatcgggaagacctatatgctagcgggacttgcaaactatgtagcaactaattttgatcggaatgttgtatttttacatgttccaacttttattgcaggtttatcaagtcattttggtgataacagcttgcaagatgagatcaggaatttagctgaatgcgatgtcttaattttggatgacattggggcagaaacattaagtcagtggtcacgtgatgacgttttaggagtaattttacaggcaagaatggataatgttttgccaacctttttctcttctaatttagatatggaagcattagagtcacactttgaggaaacccgtaatgcaactgatccagttaaagctaaaagattaatgcaacgagtacgttttttagctaaagaagtagtagtttccggtcccgatcgacgaaatttttcgcattaatttcaaaaagttcttgcatcgttcactttgatgcgtataattgaagttaattaaacgagacatgatgatgttcggctcagagagaaggacctagttctggaagttcttcattagaaaatcaccccaatcgtttattcccaaaattgaattttaagaggctggatacctttatcaatctatacgagaggttagacgtacgctaacctgaattttgggtggaaccacgcaattaacacgtcccagtgcttttattagcactgggatttttttattggaggtaaaaatatgagtttttcaattactttgccagacggttcaaagaaagattttgataaggctgtttcagttaaggaagtagcttcatcaatcgctacatctcttggaaaagctgccgttggtgctaaagtaaatggcgttgttaagccacttgattatgaaattgacaatgatgttgaagttgctattcttactgacaaggatgaagaaggcttagacattttaagagctactgctgcttttgcacttgaagcagttgctaagaacaagtacccagaacttcgtttgggtcaacatgttgctgatgaaggcggcttttacgtagatactgacaaagatgaccaaattaaggttactgaattgccagaacttgaaaaggctatggaaaaattagttaagagtggtcaagcaattgaacatgttgtaatggacaagtcagaacttgaagatattttcaaggatgacccttacaagactgatcttttgaagaaaattgatgctgacaaggttgatgcttacaagttaggtgatttcgttgactttggctttgatgctttattgccaaacactggtaagattaagcacttcaagcttttgtcagttgctggtgcttactggcttggtaaatcatccaacccaatgcttcaaagaatcttcggtactgctttcttcaaggaagctgctttaaaggaagatttgaagcgtcgtgcagaaattaaggaacgcgaccacagaactatcggtcgtgaccttgacttcttcttcgttgatcctaaggttggtgctggtcttccttactggatgccaaagggtgctactattcgtcgtgttgttgaacgttacattatcgaccgtgaagttgctgacggttatcaacacgtttatactccagtattaatgaaccttgatgcttacaagacttcaggtcactgggcacactaccgtgatgacatgttcccaccaatggacatgggtgatggcgaaatgcttgaacttcgtccaatgaactgtccttcacatattcaaatttataagcaccacattcgttcataccgtgacttgccacttcgtgttgctgaacttggtatgatgcacagatatgaaaagtcaggcgctttgtcaggccttcaacgtgtacgtgaaatgactttgaatgatggccacacttttgttgccttggatcaagttcaaactgaattcgctaagattttgaagttaatcatggacgtatacaaggacttcgatattactgattactacttcagactttcataccgtgatccaaagaatactgacaagtactttgcaaatgacgaaatgtgggaaagaagtcaaaagatgcttaagggtgctatggatgaccttggccttgactatgttgaagctgaaggtgaagcagcattctacggtcctaagcttgatattcaaactaagactgctttgggtaatgacgaaactatgtcaactatccaacttgacttcatgcttccagaaagatttggcttaacttacgttggtcaagatggtgaagaacaccgtccagttatgattcaccgtggtattgttggtactatggaaagattcattgcttaccttactgaaatttacaagggtgcattcccaacttggcttgctccagttcaagttaaaattatcccagttaaccttgatgctcatggtgaatatgcagaaaaggttcgtcaagaacttgctaagcgtggcttcagagcagaagttgatactcgtaacgaaaagatgggttacaagattcgtgaatcacaaacccaaaaggtaccttacactttggtgttaggcgacgaagaaatgaagaacggtagcgtaaacgtacgtcgttacggtactgacgaagaaatttctaagagccttactgattttattaatgaaattgatgcagatgttaagtcatactcaagagaaaattaattaatataattaaaaaataaaataaaaaaacgtatgctatgccaggtctaattaagatggctttattgcatacgtttttttggtaaagctaatgtaattgattttttacgtttgtaagtaagaagtaaaagaactgtcatcccctttaacttttatgaaatattttaatgaaataatgaaaataggagttatataaggaaaggtgataaacttgaaaaataagctcattatatttatgacaactgcgctattcatgttagctattattgtaatgggtcaaaatagagtagatgctgcatcctggggagctaagaatttatttactacaccaaaggaaactcgcggaacatggtactataagcaagaaggcaaaataaagaagcttaaaattacaacgcatacatttaataaaatcaaattatataaaatgttgagcagtaatcaagcgattaagtggactaaaaaattagctaaaactgataaaaagtcggggtataaattagctcaaaaagttggtacctctcaatacgaagctactgattttaaattttataaaacagcaggttttgctgccaatggttggctttctagtgatagagctgattcaggacacacttatgttgctataaagaaaaaagataaaagtaataatgataaagtagatgcactgcggagactgtaaaatagtttgtgtaaggatgaataattccttaaatttatttctttaaacattagaaaaaggggttcctttctcgtatgattggtttgaacaaaaaaacacatacagaaagaagaactccttcatgaatgattttaccaaaaatatagcacaagctctattcaatccagacaaaataaacgatttattgcgcaaagagctacaacaggctgttaataacttgctagaagctgaattgactgcctttctgggctatgatccctatgccagaaatggctggaatactggcaattctagaaatggtgcttatttccgcaaggttgatacccagtttggaccaattgaagtgcaagtgcctcgagatcgcaacagccagtttcatcagcacacgctgcctgactacaagcagcactctgatgttttggaaagcacgattatcaagctctactccaaaggcgtaactaccagagaaatcgctgacttgattgagaaaatgtatggcagtcattatagtccagcccaagtatcaaatatttccaagcagatgctccccaaggttgaggcttatcacaagcgcaagctaagcgacaagtttttctgtgtctatttggatgcgacataccttcctttgcgccgagaaacgtttgagcgtgaagcagtctatattgccattggcattaaacctaatggacataaagaagtcattgactactgcattgcgcctagtgagaacattgaagtctggacagagatgcttcaaaacatgaagtccagaggcttgaagcaagttgagctctttctttctgatggtgttgttggcatgaaagcggccttgaccaggacttatcctaaagctcattttcaacgctgcctggttcatgtcatgcgcaatatctgtgctaaagtctgggtggatgaccgcgaaaagatcatgaacgaattcaagcagatacatcaacagacaagccaaaaagaagctgcagctgtcttgcatgaattttatgcaaaatggaataaagcttatagccatgttatcaaaggtttgagggaaattgagcccgatctgctggtcttctacaattatcccaaacaaatcagagcttcaatttattcaaccaacatgattgaatcctttaacaacgtcatcaagcgtaaagctaagcctaaggcagaatttccaactgaacagtcgcttgatgtatttattggcatccaggcaatgagctacaatgaccgctatttcaaccgaattcataaaggctttggtcaggttcaggacaccttagaatcctactttgattaaataaataattaaaaaatcaatttacgagaaagatctatttacacaaaagatttgacagtttcgcactgcgagtaggaaatggagcagataattcatttttatattattgttataagagcaaaaaattaatcaaataagttacccggatttaaaattgaagtgcaacactaattgttaaacaaaaaggccatgaagacctaaacttgaagtgaccaaaaatcaagaaaggaagatcttcatgaccaactcaaattctagcatttccaagcattatcatcaattgaacagcgaacaacgtggacaaattcaagctctgcttgattctggcataacctcctgcactgctatcgctcaagaagtaggctgtcataaatcaactatcagccgtgaaattagacgaggcagtgtcctgcaaagagacagcagctatgtcttgtatgagcactattacgctgatactgcacaaatttatcatgaaaagcgccgcagaaactgctataagtgtaatccactgcaacactatgccgtttttttcagaatgctaagcagacgctttaaagccaaatttgatgccactagcattgatgaattcgttggtgaatttcacaggattatgccaaattatccatgtcctagcacgcccactgtctatcgttatattgatcaaggattgctggatataagcaatatcgacctgccaatgaagcttaaaagacgcagaaacaaacgccatcatagtcatggtggccatgctccgcataaaaagaatcttggcaattcgattgaacagcggcctaaagaagttgaaaacagaaaagttcccctgcactgggaaggcgatttggttaaaggcgtcagacgtaaaaatcaacctgccttaatgacactgactgaaagaaccactcgttttgaggttgttatcaaaattcctgactatcgggccagtacttgtcaaagactgcttcaaaaggagattgacagacatcctaattggtttaaatcaattacgtttgacaatggttctgagtttgcggatatgaccaaaatcaaaggatgtcagatctactttgctcatccatattctccttgggaaagaggcacaaatgagaactgcaatggacttctgcgtcaattcttccctcatctccatagataaccgttctagatgttgttctagagcggtttttgttttgcagaggtatctaaaaggtatccatttaattaaatttgatctaaaatgtttactatttgttgatcagattgttgttttaattcgtctagcatataagcgtaagtattagctgtaatactcatgtttgaatgtcctagtcgtttacttatcgagtataagtcaactcccttaaatagtaacattgctacatgagtatgcctcaaactgtgaaaatgaaaaccatcttttttaatcttattttttgccagttgttttctaagaactttgtttacagcatttgatgaaggaatagttccatcctttccgatgaatagtcgttcatgatgattaacctttagttgatctaaaatattcaataaattttgatctaccttgatgattctagtagatgacttatttttcgtttctttatttatgtcgtcagaatcataattgattattttattattatcatagtcccacgatttagagatactaatagtgtgattcttgaagtcgatatcatgccatgttaacaccttaatttcacctggacgcattccagtataaattattgttagtagcatataacgactgatataagagggagtaatatcttttaaaagtgatttttttagtttttgaacctctttaaagtttaaatattcaatttttcttgaacgttcctcattccatgtaagattaatgcgctcagtaaaattaattttaactaatccttcactcattgcgtcttttacacaagttcgtattgttccgttagtcttatagaccgtatctttaacatgcttttttccatacgaattcataaaatgttggtaagagcggcgagtaatttttgaaattctggttttaccaaaattctgttgtagtaatacataaatgtgcttatatctattttgagtgttgtttgatttgccaggaattttataggtctcgtaccagtccttaaaataatcagcaaaaatggggtcttgattagatatttgattggcgtcttttgcaacttccatttcattagcccattttctggctgcagatttggttaaaaacccctgttttactttaaaacaacgcttaccttgctcatcataccaagatacttgtgcccgccatttagtgcctcttttttcaaaatgcgccatcttatttacctcttaaatttaaattattcatatgttatttatgcattacgtataagttacttatatgctgcttatataaattgccccgtctactatagtgaagtaggcgggtatttttgatagttagtaatatttagtttggtcatagactcattcttcaaatttatatttacttagttcttcttgtacttgaaagtaatcctttgtcccgatactttgggcaaaatttagccaattagcggtttgaagatcattacctaacgcaaagtattgtttgactctttcatgtattaaaaaggaattagcactatgttcactacaagtgtgtgcgcagtcgtcgctttgataatcaccttgcacatccttgtcgtacatcatatgtcccagttcatgtagaattacatttttagcttgctcatcatcatagcttgagttaactatcatcacatcaggcttattatctttaccatgaacaagcaaacctgggcagtgtagaggagcaaattctaatcttatgtgtgattccttaagtatttttttaagttcagtgtccataatgcacaccttttcctatttttcattgtaaattctctttagaatatctctgactaattctttatcgtggtcgtccattggtttgccatcgaagaatctagcattattaatcatttcacttagatcggtgtcatttgctgaaccagatgtttttcttccgagtaactcatcagtacttacttgaaaatagtcagctaatatttttaatgtatctgatccaggaattgctcgacctgtttcccaagatccaatagtttgttgagaaacatgtaaaatttcacctaattctgcttgatttaaattcttttgctttctaagtgttttgatattatttgctaatttctttctatcataatctttcattttctaggctccttaactattaatttacatttatattactactaatactaataaaaatagtgaattactactaaaaatagttttaatttgatttctatcttgaaatactaattaaaatagtataatatataaatgtagttaaggggaggtattaaatgttaactaagcttaaaattttaagagttgaaaaaggcatgagtcaatcagatctcgcacaagctttaggtacaacgcaagttacggtgtcagcatgggaaacaggtagatctactccaagaccacctatgatgcaaaaaattgctgattattttggagttagcaaagatgatattttttttagagcttttaactactcaaaatagtaatacgctgaacaatcaagcacttaaccaataagaatagtaaagggaggataacagatggaaaatgaatttaaaggatctaaagcatttctgatgattccaccatcaatttcacgagatgaagatttattaagaaaacctaaatcgatacttttaatgggtgaaattatctcaatgcttaatgtcactggcaatttttttatgagtaaccaaaaaatcgcagaacatttaaaagtatcaggtcgtcaggttaatagatatttggatttgcttgaaaagaaaaaattaattgagcgtgaaaaagttgttagtgataaaaatggtgcaattttaggaagaaaaattcatgctggttcagcccttatgacatacatgtcactagggtggggaactgagcgtcacaagggtagtgacaccaatgtcacacccccagtgtcacccatgtcacataaatataacagagttaatagatcatctaatagaacagttaataattcttcttctaggaagaaagaagaagatccagaaagagaaaaaatctacaaagaatttttctttattgcaagaataaacgataaacgcaaaaatcaaacaactagaccatctcttgatgaaattaagcaaatgagaaagttgctatatgaatgtgatgttgacactctacgagctgtgaaggataaattcaaagagcgaatggagtgggacatggtcggtaaaccatttgcatatttactcaaattgctaagagatggtttagcaaatgacaaaaattatgaaagctggggataaagatgcaagaagatatgactaatgcgctaatcaatattccaagtcttacgaattttattaaaagtattgttaaagaaactgtcaaagaagacaagaatgatttaactggaaaaacttggaatatcaaacaatttagagaaatttgttgtcgtggtaaaggcgataactgggtgagaacttttatatttgatgagtttccagaagttgattacaagaaagggggctttgtagtaaatcctagaaagactcctgaaggcaagacaacaatcattttcgctaaagaagcctgtgagtggatgcaaaaacatcaacatgagattgattggaatgcaaagatcactagctagatcaaaagcaataaaaaacgctctacaaaatagcagaacgttagagatttagaaaaaatggagaaaaacaatgaaattaacaggtaaaaaagaaaattttgatgaatttttattcaaagtagacgagttaggttacgccattaatgacttactccctgctagctggacattgaatttaagtgaatctactaacaagttaagtgaattacttagtgatagtcatctaaaaattaagcaaaaaaccgtgacatcaacagatagtgtggcaattcagattaaaacaagtctacaagacacagaattgcaagtatcagctagttcagttgtgacgttagaatcagaaaatcaactagagtatgttttgaattggtggcaatggcaaattaattgtcaattagcattaattgctgaaatttcaaatgtgtttgaaactacagaagaatatgaagttagttagcattttctaagacagatttgattaatgaaatgattaaatccgtttgctgatcagttaaatcagttggtaaaacattcagtattttagtctgttgtggggttaaattggtggagatatctgctaaagattcaacgctaacgttaaataaagctgctagtttagctatgttttcctgggtaggggtatttacccctgctaaccatttataaactgtaatcggctttaaattaagcttatcagctagttctttaacagataaattgctagcttgaattaattgcttgagagaatcgatccgaaagtttaattcaggatcatcagttttttttgctaaattggctaaaaaatcttgagttggttgatatgaagggtcaatttcatttggattaacgtgcagcgctttagcaatcttaatgagattgttttgtggaattgcaccatttcctaaataatatcgattaattgaaggaatggggattccagttaatgctgaaagttcacgttgagttaatttttgattgaataataaccgttttaagttagcacttgttatggcaatgacagattgcttaagtttatctttcataatattacctctaaaaataaaaaatacggattgaatcattaataatatatcatttttgcgatacctttgtataaaactaaaagatattgatataaatgaaattaactagataacgaggaaagtagaaaatgagtccaagaaataaaaaagttgcacaagatttacttaacgataagattgatattcagcaaattgaagataggttgttttgccgttatgctgctcggtatgtcagataactttgaattgaatggacaacagcttaatgaaaaacagaaattagaattaagtaattatttggtgggtgaagtattcgggttaatgggaaatagctctatggttttgaaacaacggctttatccagattatgttttaaaaattaacgttttacttaaagaaacttaaacttcccacactaaataagccagtaatctcttgatcttgcttggctttaggcttctatattatttttgctagttttctttaacaatttttgcatgtatttgggtaaacgattgataaagtcagccgtgaattcagctatttgtgcttcactggcatgaaagacttgctttacgctggccagcattgcatcagtaatcaattgcaaggaatggctaaaagtaatgtccgccagctcatcaatcatgcaatagaacagctcgcctagcgtgcgttcatcttcatcgtcccgcttggcaactgacataagcatgtagcgagtaaaaactatggcaacatgagcggtcaaagcatcgtaagacaggccatgatattccgtacttagttttagataacttttgcaagttttgaaaaaaacctcaatatcccaacgcttgccgtagttgcggataatttcatcttcgctaagcgacatgtcggtacaaatgattgccagccaatccttgcgattggcacggtttctaacgcagacaatccgtgcatctattttagcaccgtctttgtcctggcgtccgactttgactgggattgacagcaggtagcgagaacggccgcatcgctttttacagctgcgataaatctgtttgatgtttttgcgttctccctcaaattcatatttgattttggagctaaccttaaccatggcaatcacatccagcttcctttgcttgagctggacgatttgatgtggatttgagaaccagctgtcaaacagcacgtacttggcttgatgacctgctttcatagcttggtcgattaaattaaccatcacgtctgtgcctttagtccgggcaagcatacgtctttggccagcaatggtgcgctgatcaaaaactttattttcgccaatcatattctgtagcttctgagaagacagcagcactgaattgattggcatgaaagaagctccatcagtccagcccagggtcatcatgcgaaaacctttcttgtaagtcattgatacatggtcaaaaactttggcgactaattctgttttcttgaagccggtcctagagaagtaggaatcatcgacaacaaagcaatcagcccgtttttctgaagtcaaagatcgcaagtggttattaatgatttgcgcagacagaagtgtggtgaagtggagccaattgacgtgaacgttgcgcataaaacggtaatatgagttcttggaaaaattttcttgaaaatgatccattttcagctgcatatataagctgcggtcacgaaagacattgcttaaaacgtaaagaaacaagctgaacaggctaatgcctttttccttgcggaagccacattttctcaacagcttgatcacctgaaacttcttgatgaagctgatgattgagtttgaaaatagttgttcattttgttggtcaggagatggtaaaatagacattggcacaagcctttcatgcaaataaattatgttttggtcaatataattatagcaatgaaaaggacttgtgccttttatatttgtcaaaacacgcagaatcacaatgaaacaagcaattttgcgtgtgggaagtttaagaaagaaacattaattagaaaccaattgattaaggacgtactggagaatgataatgaataagtttgatttgtggtctggtgtgatgactacaccagctgaattagctaaagtctttacttggcgatttagacgtgatgtgcttggaataagaccggtagatagcaatagttttgatgtctgtgtagaacaaataaatggtcaactaattagtattagagctgatcaaaaaatcaaatatattggagctggtaagtggcttgtagtgattgagaggagcaagctatgaaaatatttcttagtacatgcttatcttattttctaacaagtctaattgggctagaagtgttgtttagacatctggaacttaaagacaaatatgttaaaagaatgaccagccgaaataaacagattgtagattatcgttttgtttcgcttaaagtagtaaattcaagtctgagccaagggacagttaccttaggcttgctatcaaataagcaacattcgtttgaagctaaggttgaaccattgttaattaaggcaactgtgccccatgagcaaataaagttgattagagctaaagatgttcatcaaattgaagcaaatttacaagttgttattgacactacaagcaatgttcctcaaattcagacaaagataatgaggattactaagtatatttaggaggacagcatgtttttagtactttcacaaacagattggttttggattatggtttgggtctttattcttgcttcagcgtttcatctatggaaatgggtttgggtagtttttggaatttatttaattttcccagctttactaacattgatggatggcgtatggagaattgcactagtaattggcgtaatttttctaggaattaagggtgtaactatgggtattgcttggattaaaagaaaaattaagcagagcaaagaagtaaagaaggcaaaagcatgacaaaaataattaagcttcacccaatatagttcggtgcaattgccaattttgggtgtgaatgcaatgttagggtcatttgtgtcccaataagttgttgaaatattttaatttttagcgtaaagttgctataatattagtgaacaaaaaagagagctactgctaatagctctcctagtacgaagccgctaaaagggcggtggcattgattatacaactaaaaagtcgctaaactctgccaaaagtttgtgagcggctttttagtttgctctactttttccacaaatcgtgaaatgctgcaatcatatcttttaaggctttgaaccactccgttacttttttggtaagcaagatgagacttactaccagtagacaaagcagatagattacggctatgacagactgtaaaaagcctgtcatttggcaaactgtacctcctttcaatagattttagggcaatagttaatacaccattggcaccacctccatgaaaacgaaagtaccaccgcttatttaactttttcgtactaaagctattctagcaaattagatgtagttatgatagctagtttaaggatatagaacaaaaattctgtatcttttttatttttagtcttgaaatatcgcaaaaacgatatataatataaatatcaaaaatattttagaagagagaggagcgagaaatatgattaatcaagttgtaatggatggttacatcggaaaagatttagagttaaaaactactcaatctttaaaaaagtatgtaacctttactatttgtcaaaaccgttatagtaaagttcaaagaggctatgttggtgagtggcaccatgtaattgcttggaataaagttgctgaaaacttagtagctaatacacataaagggtcaaaagtaatcttggcaggtgaacaaagggttagaaaatttgtagacaaaaatggtaatagagtagcgtatgaatatatttgggtcaattcatttgatatcttaactagtcaaaatgaggatatagccaatagcccttcacaaaatacaaataaacaaaatatgaataatatggaagatgaagagccagaagttgatcgaactattgtagaagcaaataagcaagataaattagcggaagatccttttaataatcaaaaagaagttcaattaacagatgctgatttaccattttaaggatagtatgattggcgagtgttggatggcaaggaagtcagtaaaaaataggcgctttagcgtattcagagttgaaaaagaagtttatgaaattctgacgatagacgggtaccattactggaatgttgatggactatttataaaagacccaaaatattttttatctctcaaatatcacaaaaccgatataaaatataaagagacaaccttttatcgagtaaatgagatttatgatcaaatttatttaggctttggatttgaagtaaatcctaaattaggacatcgcaggttattgtgtaaaagaaaatatcccgatcatcataggaaaaagccgctaattgatgttagcaagtaagatattatgatcagttcatttatattagaacattttcgatacatagtgatcgcatttggagcggggaatttattcataattattcttatggcaatatcatctttgccaagtttagcaggcacaaggtttgctaacttttttgaaaaattggatgaattagtgacagttctgctatcgattcttggaattattctatggatcatgattttatttatcggatattactggagctatttaatgtaaaactagggcataatttaataggtaaaatgcaagttggaatgaatattggttaaaggagttgctcctcttttgaatcaaaaagttgatattcatatatatccctatttttaatactttaatactcaatacttgcaatgaaagttcgaatctttccgctcgagactgtaaaatagtttgtgtaaggatgaataattccttaaatttatttctttaaacattagaaaaaggagttcctttctcgtatgattggtttgaacaaaaaaacacatacagaaagaagaactccttcatgaatgattttacaaaaaatatagcacaagctctattcaatcaagacaaaataaatgatttattgcgcaaagagctacaacaggctgttaataacttgttagaagctgaattgactgcctttctgggctatgatccctatgccagaaatggctggaatactggcaactctagaaatggtgcttatttccgcaaagttgatacgcaatttggcccaattgaagtgcaagtgcctcgggatcgcaacggtcaatttcatcagcacacgctgcctgactacaagcagcactcggatatcttggaaagcatgattatcaagctttactccaagggcgtgaccaccagggaaatagccgatctaattgaaaagatgtatggcagccattacagtccagctcaagtatcaaatatttccaagcagatgctccccaaggttgaggcttatcacaagcgcaagctaagcgacaagtttttctgtgtctatttggatgcgacataccttcctttgcgccgagaaacgtttgagcgtgaagcagtatatattgccattggcattaaacctaatggacataaggaagtcattgactactgcattgctcctagtgagaacattgaagtctggacagagatgcttcaaaacatgaagtccagaggcttgaagcaagttgaactctttctttctgatggtgttgttggcatgaaaacagccttggccaggacttatcctaaagctcattttcaacgctgcctggttcatgtcatgcgcaatatctgtgctaaagtccgggtggatgaccgcgaaaagatcatgaacgaattcaagcagatacatcaacagacaagcaaaaaagaagctgcagctgtcttgcacaaattctatgccagatggaataaagcttatagcaatgtcatcaaaggtttgaaggaaattgagcccgatctgctggtcttctacaattatcccaaacaaatcagagcttcaatttattcaaccaatatgattgaatcctttaacaacgtcatcaagcgtaaagctaagcctaaggcagaatttccaactgaacagtcgcttgatgcatttattggcatccaggcaatgagctacaatgaccgctatttcaaccgaattcataaaggctttggtcaggttcaggataccttagaatcctattttgattaaataaatgattaaaaaatcaatttacgagaaagaactatttacacaaaagatttgacagtttcaaaaatggtgaaagtttgattcataagatatatgtgcaagtctataatgatatacttcctttgcttgaatcaaatttgcatttagattttactggtaaaattttgaactctctaaatgattgggtatcaattgataatgaccgtcaaaatgatgtggttttaacaccaagatacataacgaatatgatggctaggttagctcatacaaataaagattcgtttgtgtgggatttggcaatgggatctgcaggatttttagtgtctgcaatggatattatggttaaggatgctaaaaatacaattcaagataaacagaaactagagtgcaagattcaaaatattaaagaaaatcaattactgggtgtagaaatactgggcaatatttacattttagccgttttaaacatgatcctaatgggagatggatctagcaatatggttaatggtaatagtcatgagctgtataaaaattacacacagtttccagcaaatgtgtttttgctaaatcctccatactctgcagaaggaaaaggttttatttttgttcaagaagcattgtcacaaatgacaaaaggctatgcggcaattattattcaagaaaacgctggtagtggcaacgggctgccttacacaaaaaatattcttaaaaataatactttagttgcctctattcatatgccaactgatttatttggtggaaaagctagtgttcagactgctatttatgtatttaaagtagctagaccacatgaagaagatgatttagtaaccttcttagattttagtgaagatggatatactagaatgaaccgtaaaaaatctggtcagaaggttaatttacgtgatacagatcatgccaaagaacgttatgaagaagtagttgcaattgttagtgataaaaagcctaaaacgaattactatactgaacgaaaccataaagtaattaaagatacaatcactctagaaggcaatgattggacttataaccagcatttaaaaattgacacaacacctgcagaagaggactttaaaaggactgtggcagattatctatcgtggaaggttagtcaagttataggtggtcagaatggttaagtataaggaatttaaattaggtgatttatttgaaatacaaaaggtaaaaggtatcaacaagtctaaattagtaaatcctaatataagtacaaatgaatatgactatgttacccgaacatctttgaataatggcattgaaagcacaacagactttgtatgtgatgtcccctacaatgaacctaatacgtttagtttggggctgttacaaatgactttcttttatcgagaacgttcttggtatgcaggacagttcgtaaggaaaattattcccaaatttaaacttaatactaaaattgcgttgtactttaataccatttttagtagattgtctaaggtgttactgtctgttcttgttagacacgtggataatgtgtttagagactctaaggtgaggctacctgtaactgatgcagatgaaatagattttaattatatggaacaatatatagccgagcttgaacagcaacggctcgccgagcttgattcctatttaaaagctacaggattaaatgactatggactaactgatgaagacaagaaaatattagcatataagccaatatttcaagaatttaaaatagttgatctatttaatgtagttaatactcatagtatattgaagagtcaagtagctaaccttgaaaatggcaatgtgccatacttgacagcagcagaaggcaataatgctgttttaaaatacataaattgtcctaaagaatggatcgatgagggcaattgcgttttcattggtggaaaaactatggtagtaacttatcaagaaaaagatttttgttcgaatgatagtcataatttggcactatattttaaagattcaagatataaaagccctctaattcaacaatattttgtaggaagtgttagaaaagctttatctaaaaaatatagttgggatgactccatttcaaaagccaaaataagaagtgatagtgtaagattaccagttgtaagtaatacaaaaaatttagactttaattacatggagaagtacattagagcaattgaaaaactgacgattgctgaggctgtaaagtataaggatagagaaattttaactactgaatcactaattaataaaatgtaaaagttgcgttttagcttaaaaagccctgtattacaggattttttcttaatgaagtagaagtttataaaatttttgttgtaatttgtagtgaaactgtcaaatcttttgtgtaaatagatctttctcgtaaattgattttttaattatttatttaatcaaagtaggattctaaggtgtcctgaacctgaccaaagcctttatgaattcgattgaaataacggtcattgtagctcattgcctgaatgccaataaaagcatcaagcgactgttcagttggaaactatgccttaggcttagctttgcgcttgatcacattgttaaatgattcaatcatgttagtcgaataaattgaagctctgatctgcttgggatagttataaaagaccagcagatctggttctatgtctttcaagcttctgataacatggctgtaaaccttgccccatttggtatagaagtcatgcaggacagctgtggcttcttctttgtttgtctgttgatgcacctgtttgaattcgttcatgatcttttcacgatcgtcgacgcgtactttagcgcagatattgcgcatgacatgaaccaaacagcgttgaaaatgagctttaggataagtcctggccaaggctgttttcatgccaacaacaccatcagaaagaaaaagctcaacttgctttaagcctcgggatttcatgttttgaagcatatctgtccagacttcaatgttctcgctaggtgcaatgcagtagtcaatgacctccttgtgcccattaggcttgatgccaatggcaatatagactgcttcacgctcaaatgtttctcggcgcaaaggaaggtatgtcgcatccaaatagacgcagaaaaacttgtcgcttagcttgcgtttgtggtaagcctcaacctttggaatcatctgcttggaaatatttgatacctgagctggactgtaatggctgccatacatcttttcaattagatcggctatttccctggtggtcacgcccttggagtaaagcttgataatcatgctttccaagatatccgagtgctgcttgtagtcaggcagcgtgtgctgatgaaattgaccgttgcgatcccgaggcacttgcacttcaattgggccaaattgcgtatcaactttgcggaaataagcaccatttctagagttgccagtattccagccatttctggcatagggatcatagcccagaaaggcggtcaattcagcttctaacaagttattaacagcctgttgtagctctttgcgcaataaatcatttattttgtctggattgaatagagcttgagcaaaatctttggtaaaatcattcatgaaggagttcttctttctgtatgtgtttttttgttcaaaccaatcatacgagaaaggaactcctttttctaatgtttaaagaaataaatttaaggaatcattcatccttacacaaactattttacagtctctatccaaagcgcgacttgcttttctcattaatatcattgataaagcagagataataatcagaactattgcaataacacttgcatttttccagttacctaatgtcatggcttgttggtaaatcaaggtagacattactaaatttttattacctcccaaaatttgtggggtagtatatgctgtcatcgcacctgcaaagaccaaaatgcatcctgttaaaatccctgagactaattgtggtattacaatttttatcaaattaacccatggattggcgcctaatacagcagcagcttcttctgcttcaatgtttagctcagaaatactaccaactaatgaaataatcataatcgggagaaataaataagctgaaccgatgataattgccgtatcagtataaagaatgtttaatggagaattaattaaatgaatagacatcagaaatttatttagaataccgttacgacctaaaataatgatccatgcaaagtttctgacaactgcattcgttaacattggaaaaagaatgataattgttaaaattgatcttactttgctcttttgacgagcaatccaaagtgaaattggaattccaagaattaaaacaatgatcatagtgagtaaagcaattttaaatgttctaccaattacatgaagattgtacgtgttttttagaaattcagtgtataggtgcaaaaatcctttagaatcttgaaatgttggtatagcaatctgaattaatggaaagaatgcaaaaatcaagacactaataaatgccggaaatagcagccaaaaactggattttattttcatattgttcgtattcctccttatcttgtcttagaataatttaaatgtaaaaataagtcaatacaaaatatgaattaaaataataacatttgtgttaattgtatgcgtattgtattatttatgaatataaatagatttatttataaatttatcttcttgaaaatacgaacattaccaaaaaggaagtggagttcttaatgaaaaagccagttattattagtacagatccaggaatagatgacgcagttgcattagcaatatgtcttttttcgcctgcaattgaagttaaaagtattattgcaactaatggcaatgttaatgcgcaacaagctttaataaatatattgaaattggagaaatttttcggtaaaagtattcctgtagtaaaaggggtagagcgttcattagtcaaacaatctattcgagctaaagaaatacatggtaaatcaggaatggacggatatgattttccaaatcctagttttgaattggtggatcatggcatatcaccggttgccatacataaaatagttgcagcttcttctgaaaaagtaactcttattggaattgcaccacttactgattacgctctatatgttcgtttatacccagatgatataaaaaatattaaggaactaattattatgggcggagcaatgggtagaggtaattatggtatctattctgaattcaatattgcatctgatcctgaagctgcaaaaatcatttttgaaagtggattaaaaattagagtagcgcctttagaattaggtgcacaagctaaaattatgcctgaagtaagtaatcaaatacgacagttaggaaaagctggtgatatgttttacgacttatttaagaaatttcgaggtggcagttttcaaactggccttaaaatttatgatgcacttgcagcaggcgtacttttaaatccgcaaatgtttaaatttaaaaatacacatgtagaaattgatgttcaaaccggttatacatatggtgcttcattgatggattttaaaaataagctagatcttccaaataatgctgaaatagcagtgtctgtagatccagaaattttttctaaatggtttgtagaagctttatcaaaaacaagataaaaaagtcaattaattgtcaacaattaattgacggataatggttaagcgagtatactactactagttgagaacaagaagaagcacccgcttctcgcctaagttaagtaaacctctaggctgattgataatttctgttgattaaaggcgggtatgattcttataacccgcctttttcttgtcctcaaattaacacggaggtgaacagttataccaagaagtttaatcttaaacgacagaattcgcgctcgcgaagttcgtttaattgatgaagatggtcagcaagttggtgtgatgagtaaaagtgatgccttacgtcgtgcaagcgatgcaggtcttgacttagctctgatttctccaaatgctaagccacctgtagcacgtatcatggattacgggaagtaccgctttgaacaacaaaagaagcttaaggaagcccgtaagaattccaagacagtcagtgtcaaagaaattcgtttgagtccaactattgaaggtaacgacttcgaaactaaacttaagcacgttcgtaagttcatttctaaagaaggagctaaggttcgcgtctcaattcgttttagaggtcgtgccatcactcacaaggaattaggtcaacaagtacttgaaaaaatggccgaagtaacctcagacattgctaatgtaattagtaagcctaagatggaaggtcgttcaatgttcttgatgcttgcacctaagagtgataaggacaaaaagaaaaagtagttaattggaggaaatagaaatatgccaaagatgaaaacacaccgcgcttctgctaagcgttttaagagaactgcaaatggtggtttaaagcgtcaccacgcatttactggtcaccgtttccacggtaagacaaagaagcaacgtcgtcacttgagaaaagctgctatggtttcaaagagtgatatgaagcgtatcaagcaaatggttgctcaaatgcactaatacttgttcttaattaagacagactatagtaggaggaattttaaatgccaagagttaaaggtggaacagtaacacgtcaacgtcgtaagaagatcatgaagcttgccaagggttaccgtggcgcaaagcacatgcaatttaaggctgcaagcactcaattattcgtttcatacaagtacgcattccgcgaccgtagaagacgtaagagtgaattcagaaagttatggattgctcgtattaacgcagctgcaagacaaaacgacatctcatattctaagttaatgcacggcttgaagttggctggtgttgacatgaaccgtaagatgttagctgatattgcttacaacgactcaaagacttttgcacaattagcagaaactgctaagaaagctttgaactaataacaaaagaaataagctagggaaattttcctagcttatttttttatctatttttgaattaatgctcgtaatctaattttttcatctggcgtagtaaaggccgcgtcaaccgcgttgagataaagagtggtttcttcttcaggagtcaaggcggtcttttcttcaagcagttggtattcatgcggtaaattggtattggaaacgatcatatcatcagaatttagcgtgactttcattcccatgtgcaataatttttttattgggtaagaatcaatctgatcaaaagctttggtgttcatatttgaagtggcgcaacattccaatatgatttggtgatcaatcagatattgggtaagtgctggatcttcagtgcagcgaatgccatggccgatccgtttcgcgccaatttttaatgcttgacggattgaatcaggtcccgcagcctcaccagcatggatggtataaggaaggtgtaattcttgggcacgattgaaaaaatgctggtagttaatgtgagggatcgggccttccgcaccagctaggtcaaggccaacaacgccatgacctaaaaattctttcgctagctcaaccgtttccatgttttctttttcattgtgggcgaagcgcatcaaacagagaattaaaccagcgtgtaattcaggctgatctttgtctgctttttgtttttgataaaacttcgtaataccgctgactgctgcagcgattacttgtctttgcgttaaaccatttttagtatgtaattgcggtgcaaagcggatctcggcgtagactagaccttgttgttttaattcgcaaagaagatcaaacacaatcatctccagatcatgctttgtcttcattaactggttaggtaagtcaaacttttccaaaaattgttccaagctagcgcaagaattatcaactgacaattcttgccgcaatttttgatcagttaactgtggcatgtgatgttcctgcattaacttcttaacagtagcaactgggacagaaccgtcgaggtgaaggtgtaaatcgatgaattttctcatggtgatcctttctgttgattgatgattttgcttaaattgtttagtattgtaacactttttcatcagaaaaaaacaaaaatttctaaagcaaacccatttttgatatgatataaggtgataaaaaatggaggaaattaacagttaaaagatagacaagatacaaagatctgttcagaaatataaaacatagaagcaggtcaaaaactaaaaatttaatattttgttcgcttgtatttatttcactctttgctaaatttatgtttgtattggaggtgaaacaaatgatcaaggctcaagtagtcgaattaaaacctaacaagaccatgcaacaagagctggataagctttgtgattatcgcagatattgctggaatcaagctttagccacttggcaagacatgtatgaagcacgaaccttagataaggataataatcccagtccaaatgagcgcagaatacgtgatgagctagtcgataataaggcagactggcagtttgctctgtctgctagatgcttgcaattagcagtcaaagatttggctaatgcttggaagaatttctttgataaggcacagcctgattgggggaaaccacatttcaaatcaaagaaggccccgcgacaaggctttaagactgaccgggctaaagtggttaatggtaagctacgcttagacaagcccagaggcattaaaacctggttcgatattccaacatatgaagctttaaaaatgaagcaaattaaagttgctagtgtctttagagaaagaggacattattatgccgctctttcttatgaagaagaaactttggtaaagcctagaacaggtagaaagacagctgttgatgttaatgtgggacatttcaactacactgggggcaaaatcaatgttttgccatcaagattgcaaaaactatacaagcgcattaagcattatcagagaatgctggctaagaaaagacgggctaatggcaagttagctggccaaagcaataattacgtgcaagtgagaaccaaactgcaacgtgattatcgtaaagtagccaacattcaaaacgatcttttgcaaaaattcactacaaaattggttaataattatgatcaaatagtgattgaagacctagccgttaaacaaatgatgatgacgcacgtcgcttcaaaaggcatgcagagatcattattcagtaagtttagacagatattgacttataaatgtgagtggtatggcaaagaattaatcttggctgataaaacatatccatcaacccaaagatgtgctaattgtggttatgttaaaaaaggtgatgaaaaaatcactttgcaaggcaaccaaaaacatcacactaagcacaatgagcatatttgttatgaatgcggttatactaatgatcgtgatgataatgcagtgttaaatcttttagctttagcaaaataatgaaaacggggctggctaagcccttaagctgcaagagttagtcaatgcgattactcctagattggaatattggaatactaatgatgacagcagtaaataaagcgaagaaaggaaggactatatttctttctgatatgtaaaaaaatatacattcttctacatatttctatgttttatatagcagtgttgatatgctttttagaccaaaatatacaattgatacgatttacaatctggacccccagaagttgaatgaaatggacattaaggcggttttttcagacctagataatacattgctcgcctggaataaatttgaaactgccaaagaaatggataattttaatcaaaagttagccaaggcgggaatcactctcgtggtcatttctaacaataatgctcaaagagtgggcaaggtacttgatccttaccatatcgaatttgtcgctaagtcacgtaagccattgccatttgcgatcaccaagaagcgcgaagcaatgcatttgcaaaaagatcaggttatgatggttggcgaccaactaatcactgacatgcaagcagggaatttggccggcgtgaagactgttctagttaagccattagttgaaactgataagtggaatacgagaatcaatcgtttctttgaaaaaattatctttttcttcctgggtttatcacatcgagtaacatttaagaaggagctatcaaatggatgaggatattatttgtatcggctgcggtgccaagctgcaatccgatgatcctgaaaaagcaggttatctgccaaaaagtgcactagataaggcaaagcaagaagaaaatgcggatgtttattgtcaacgttgcttcagattgcgccattataacgaaatcatgccagttgatttgaacaacgatgattttttagctttgcttaactctttaggacaaaagaaagctttaattgttaatgtagttgacttatttgatttttcaaattctttgctatcatcattgaagcgttttgttggaaataatgattttattttagttggtaataaatttgatctatttcctaaaaactctaagcaaagtaagattaaggattggatgagacaagaagctaaccgaatggggctttatcctaaggaaatcttcttggtttcagctaaaaagaagttgaacttggaagatttgatcgcttatattaataagcaatcgcaagacaaagatgtctattttgtagggacaactaatgttggtaagtcaactttaatcaatgccattattgacatgatgggtgatattcaagacctgatcaccgcttcacgctttcctggaactactttagacaaaattgaaattcctctagaaaatggtcactttttgattgatacgcccgggatcatgaccgagaatcaattggctacgcacttaaatgctaaggatttggagctggtctcacctaagaagcctttaaagccagctacttaccaattattgcctggtaatactttattcttagctggtttgggacggattgattatctcaagggcgaatcgactagctttactgtttacgttgctcgtggaatgtatattcaccgtactaagacagctaatgcggatgacttttataaaaagcataaaggtgaattgttatccccaccagctgcagatgatgaaatggcaccactaaagggtcaagaatttagaacggaatataagagtgaccttttatttggtggaattggttttgtgactgtacccaagggatgcgttgttaagacttacacaccagatgggattggtttaggtattcgtcgtgcattgatttagaggtttgcatatggttaatccaaaatgtattgaaaaaatgccaactgctaaagttgaagcagaattggaacaagaacaaggtaaaggtcgtcagattgggattatgggtggtacctttaatccggtgcatattgcgcacttggtagcggcagagcaagcaatgactaagttgaagctggatgaggtctggtttattccggataatattccaccgcataaaaatgctccgctgacttctgctaaagatcgggcaacgatgcttgatttagctacgcgcgataatcctaactttagggtaaaactattggaattgttccgaggcggcgtttcttatactgtggatactatgcgttatctcaaggaaaaagcacctcagaatgactattatttgattatgggcagtgatcaggttaacagtttccatacttggaaggaagctccgaccctggctaaactagtaacattggtcggaattcgtcgtccaggttatccacaagatccgcaatatcccatgatttgggttgacgcaccagatattcgcctaagttcgactgctattcgtcgcagtgtcgcaactggcacttcaattcattacttggtaccagaagccgtcagagaatatattgaagaaaaggggctttaccttgacgaaactaatttttaaaaatacttattcaccattctctagtgaacaaattgttgctaaagaaaaggcaaacatgaagaaaaaacgttttgaacattgtgttcgtgttagtgaaactgcacgtaagttggctaagttaaatggatatgatgaagaaaaagcagccttagctggctttgttcatgattatgccaagcaggtaccggtagaagagtatcgtaaggtaattaaggaacaggattttgatccagatttgcttaattggaatcgggccatctggcatggcattgtggggattttctttattgaacgtgatttaaaaattagggatcctgagattttaactgccgtacgtcgtcatacgactggtgatactaagatgactacattagataaaattatctttgtagctgattttattgaacccggacgagattttccaggagttgaagaagcgcgcaaagttgcttatgctagtcttgatgaaggggtaggctatgaattgcagcacaccttagagtttttaattgaaaataaaaataaagtatatcctcgtactttagaagcatacaatgtatggggaattaagtaataaaaaggagaaaaatattgactagtcaagaaattttagattttactacccaagcaattagtgaccgtcatggtgaagatactgaagcttacgatatgcgtggaatcagtattttagctgattactatgttattaccagtgcaggctctaatcgtcaattacatgcgatcgttaactcaattgttgatgcggctcacgaaaacaactacactgactaccgtattgaaggtaccagagattctaactggcttttgctcgatttaggtgatgttgtagtcaacgtctttactaaggaagcacgtgaattttataacttggaaaagctatgggctaacggtaagcaagttgaattgaaggaagattaagcaatgagtgttgttgggattattgcggaatttaatcctttccatagtggacatgagttcttgctaaatcaagcacgcttggttgctggtaatgatccaattgtggtgctcatgtctggtaactacgtgcaacgtggtgagatggcgattatgagcaagtgggagcgggctaaggtggctttgcaatctggtgccgatttggtatttgaaacaccattttcaacggcagtagaaccagctgatctttttgctctcggaaacattgaacaacttgctaaattaggcgtaactgatttagtctttggtgtagaagatgctaacctgaattttgcttatttgggtaaaagaattgcggaaattccccagaatcacatggattttagagattatagccaaacttattcaacacaatacaaccaaatggtagcgcatgaagtaggctatgaagttaatcagccaaatgctattttggggttagcgtattcagtagctaatcataatttaggttcaccattaaatctgcatccggtcaaccgaattggagcaggacatgatgaccttttacaaagagaaaaagttgtccaaagtgctagtgcgattcgaaatttattattgcatggtgaagatacaaaaaatttaaagtattggatgcctaaagcagaagcaatggtgttagctgagcagaaaatttatcctaattggaatttgctatatccatttttgaagtatcaaattgaatcatcttcagttgaagaattgcgtcatatttatcaaatgagcgaagggcttgaatataagatgaaacaagagattcatttagcccgcgattttacagaatttttgcggcatatcaagtccaagcgttatacttattcccgtttgcgccgtttgagcttatatactttgcttaatgtcactcaggatgatatattggctagctttaatcatgagtctttgatgctcttaggctttagtaaggtaggtcgcaaatatttaaagcaacagcgcaaggaatttcagacagaaatcgtctctaaagttgataaaagaagtgctaagaacggctctttagctttacaagttagggtagaccgtttatttgaacaaataatgggcgttgatcaaaactttggtcgacggccaatcgaggtgtaaaaatgttagaacttagtttttctaggattcaaaattccaaggaaccattaactcacattgaacgtgatttggaaatgcgtccagaattttttaagcgtagtaaagatctactaattgatgcgaaaaatgtaaaagtgagcggtgacttgttctatcaagaaccatttgtgactggcagttttcatgtggccgctgatctggttgtgccatcaagcagaagccttaagccggtaaactatcatgaagattttacttttactgaaaactaccttgatcgtaagccaaccaaggaagaattggaagaaaacgatactattgtacaagttgagaatgaccaaattgacttgcaaacagcggtagaagataatattttactccatattccaactactattttgactcctgaagaaaaagaaaagaatattttcccagagggtcaaggttgggaagttgtttctgaaacctcttttgaagaaggcaagaagaaccaagttaacccagcttttgctaaattgaaggtcttgcttgatgggcaagataatgataaggacaataaaaataagtaataaatgtaattgaaaaatatggtggacaatcaaagaaaatttttactttgattgttttttaatcttgtgttagaagcacttttaaagtatcctttaattataaaagcattttttaattaatttattagtattagaaaaccaaattgatctacgaggaaatgaattaacatggcaaaaattctaattattgaagatgaaaagaacttatctcgctttgtcgagcttgaattgcaacatgaaaattacgagactgttgttgagaataatggtcgtaagggattagaagatgcattgagtcaagactttgatgctatcttgcttgacttgatgttacctgatttaaatgggttggaaattgcacgtcgtgttcgtcaagttaagactacgccaattatcatgatgactgcacgtgattcagtgatcgaccgtgtttctggtttggatcatggcgctgacgattatattgttaagccttttgcaattgaagaacttttagctcgtcttcgcgcagtgttacgtcgcgttaaaatcgaaaaggacgcatcaaaggttactgttgctaagcaaaagattgtaaaatttaaagatttgacaattgaaactgctaaccgaattgtgcaccgtggtgatggcaaggcaatcgatttaactaaacgcgaatacaacttattaatgaccttgattgaaaataagaacaacgtagttagtcgtgatcaattattaaacaagatctggggtccagaatctaatatcgaaactaacgtagttgaagtttatgtacgttatttacgtaataagattgacgctccaggtcaaccatcttacattaagacggttcgtggtaccggttatatggtaagagatgaagatgatgatcaagaataaagacgaggaaaaagaggccaagcactcatccctaattgtgcgatgggttagtatcgttgcattaacgattacggtctcttttgtcatattttcagttgttgcctatcaaattgttagtcatcaatcgatggaacagcaacaagagacatctaataatgtagttaccacgatggaccggacattaagttctattcaagatgagctagagatctcaaatgtaattcctgctctgtcaccgtctaccaggcgtattttgaggggcggtcctgctattagcaaaaaagatacagagaataaagcatttagtgatagcctgatttcatcgatttcgaatccagatattaatgtagcagtttacaacaaacatgatgaaattgtttttactaatggtaattctgcacctaagctaaaagaatttgccggcaaccaacttgaagaagtagtaaaccgaaaaaaaggcaaaatgcttttaacctaccagaaaatctattctgaggtaaatggcaaattaactggctatgtagtggtttctaatagtatgacttattacaatagcttgatgagtaatttgcttcattggatggtaattatttcactgattgcaataattatcttcattgcaatttcttatattttggttgttaatgtagttcggccaattaagacgatgtctaaggtggctaaggaagttaatgctgatcctaatagtgaggctagaattaaggaactacatcgagatgatgagttagaagaattagctacttcgattaatcaaatgctagaccggatgcaaggttacattgagcaacaaaagcaatttgttggtgatgtctcacatgaattaaggacaccagtggcagtaattgaagggcatttgaacctgcttgaaagatggggcaaggatgatccgcagattttggatgaatcaattaaggcttcgttgcaagaagctgatcggatgaaacatttaattcaggaaatgcttgatttaactcgagccgagcaaatcgatgttcaatatccgtatgaagtaagtgatgttaatgaaatcatccgcagagtggtcgctgatatggcaatggttcatcctgacttcaagattcagctggatgaggatgatttacctgatgatacagagattcaaatgtatcacggtcatttggaacagttgctagtaattttgatcgataatgggattaaatattcgactgatcgcaagcagattaatgtttcagctggtgtaactaagaagaatgttaatattattgtgcaagactttggtgaggggatttctgaagaagatcaaaagaaaatcttcaatcgcttctatcgtgtggataaggctagaacccgtgaaaaaggtggcaatggtttaggtctatcgattgcacaaaaattagttgctagttataacggaacaattagtgttgaatctgttgagggtcagggcagccagtttaaattgaagttccctcggttgactaagaaaaaagccgctaagttaagaaaattaaatgagaagaaacaaatgcctaagagcaatcttgaggcataaacaaaatcctattaaatcaaggtttgggtaccaagatttaataggactttttttctctagaggcttaggtattagaaaataagaaataaaatgcttcgaaaataattataattgttcccggatttaaaattgaagtgcaacactaagtgttaaacaaaaaggccatgaagacctaaacttgaagtgacgaaaaatcaagaaaggaagatcttcatgaccaattcaaattctagcatttctaagcactatcatcaattaaccagcgtacaacgtggacaaattcaagcaatgctggattccggcataacttcccgtactgttatcgctcaagaagttggctgccataagtcgacaatcagtcgcgaaatcaaacgcggaagcgtcctgcaaagagacagcagctatttattgtatgagcactattacgctgatactgcacagatttattatgagaagcgtcgcaaaaactgctatcagcgcaatccattgaagcattatgctgtctttttgagaatgctctccagacgctttaaagctaaatttgatgccaccagcatcgatgagttcgttggtgaattccaaaggactatgccaggctacccttgtcccagcacaccaaccgtctatcgctatattgatcagggcttgctggacataagcaatattgatctgcctatgaagctcaaaagacgcaggaacaagcgtcatcacagccatggcggtcacgctttgcacaagaagcatcttggcaattccattgaacagcgtcctaaggaggttgaagacagaaaagctccgctgcactgggaaggagatctggttaaaggcgtcagacgcaagaatcagcctgctttaatgactttgactgaaagaaccacacgctttgaagtagttatcaagattcctgactatcgggcaagcacatgccaaaggctgcttcaaaaggagattgacagacatcctgcctggtttaaatcaatcacgtttgacaatggctctgagtttgcggatatgaccaagatcaagggctgccagatttactttgctcacccatattctccatgggaaaggggcaccaatgagaactgcaatggtcttttgcgtcaattcttccctaagggcaagagcatgaaagacaagtcaaaagcttatgttcaacaggcaactgatgccattaaccacaaatatcgccgaatcctccaatatcacacagcagaggaactcttcaagcaatatatctcttcataacctaactgttgcacttaatttgacaattcaggaattataattgttattaatttaagcgatttaattagctaaaaatatttaaacttaagtcatgtggtaataagtcaaatgaaaggcgatgatatttgttctttttgatcataaatttgagtatatgaaactaagccttggtaaaggttgatttttttaatgttaaacttttgtttacttttaaatttagaccaatttttgaaattaagacctcggtgtcctgtacagtttgtcatctttgagcaatttaaagataactcgtactaattttcttgcagttaatgtgcaagcacgtttatgcggcgagtagacagcttcatcatacttcttttggtaatattttttgaaaacaggatcatgtaatcttgctagattggcagcttcaatcaagtaatatcttagatatctgtttccagtcctggccattggagtatgttcgttgctgtgatctcccgattgatattgattccaggttaggccggcatacttagccagctgttcttctttatcaaagcgatcgatacttccgatctcagcgataataccagctgtataggttttgccaataccgggaattgattccagaattttgctttctggtaatgcatcaacgatacgatcaattgctttttctagatctttaatagattcattaaagctttgaatcatgttgtaatgaacagaaagcactgcatcaattgaatcagtcattactttgcctaagcgatatgaacctctaacagctttcttaattgctttagccaaggtatctggatcggaaaagcgtcctctgcctttaacctgtaagtaagaaattaagtcttcggtaggcatatccgcgatctcatccagagttttactatcggttacaatagacatcattgtagcaccgaaaagaggagtattaatcttatctttatcgacagtgattagtttattaacccgataatataaagcttcaatgaagtgctgtttggtacgagtcagttcttgaactaattcatatctggtacgcgttaaacgctctaaagcaagatagttgtcttgtctggcaatgcttactcgataatgtccaaagcttagatacaaagcaatgtaataagcatcgagaggatcagttttactttcttcaaagactttatgaaacctgctggtttctttggggttaattacatcagtctctacattgagcttttgtaaatcttcgtcattttggaaaaagtaagcaggatgaaaactgtaaatagatgtagcttccatgccaataatgatttgatcatagtgtttattttgagctagatctaaaatttgttttttcagttcactagcaccataaagatcattgacaaagctatcgttaattaagcgtttgttttgatcttctgaatcaagtgcaacgacctgtaaatctttagaactaacatcaataccgacaaataatttcattggaaatggcctcctttctttcaaatttctgatcatagattttgatcttcacatgttaacccctaattacagttcttaagttcaatctcgccagtataagtattcactggttgcttctttgaaagctgcacctaatcccaattgctcaaggactagcaaaaagaagcaatcaatacagcatgtgagttagagcataaaggaactgtctgggtggcagacttataaagcagacaaaactgcaggaggtgataacctagaccagttgaccaaagccaatgacaattagaggctaacatgtgaagatcaaaaagcaaatactaatttgattaattatcacaatatgactaattacaatttatataatacgagggatgtgacataatgaaagaacgcattttttcaaggaaattctggcagaaagtttttaactatcaattgattatctggtttctcttgatgattagttatactttttctcagcggaataatcatttttattttataggggatttgttcaatctagcttttagtacggcgatcatgggattgaacttttacgtgcaatttaaaaaggattccagcaagactaatactcaaattgttcgctggctgaccatagtaatttttcctttcaatttttgccaaatttggcatatcactgggaattttttgctaaaaaacctgccggctatcgagattctattagtattactgctatgggcggtttatattttcttgctagttccaattgcagttgtacatgttggaccgattaaaaattggtttttacgcttgctaactatttactttcttgatattcagtacggtgatgcacaaaatttagcaataaatccagattttcgctggcttcattcacttacctatcaaggtgtaatcgcagctattgctttattaacgatgacttgtttcttagttaaagcttggggctatcacttcaatccaaacttaaaatttattaaaagtccaagctttcagaagaagatcttgctggctttattgatcatggcaaccattgatttgttttacaatgagtttatcaactatgataaagcaatttggacagtattctttggtgttgacattggttcatttaaattctcaattcctaatttaactgcagccattgagcccggaattttggaagaaaccgaacgctatttattgatcgtaatttttttagctggttttaatagatttccaaagtatcgcatccctgttgcaatctatggttcagcaattttgtttggccttagtcatttaagtaatttttgctggcatggagaaagttttactgcaacaattgcacaagttattggcgtaatggggagcgcctttatctgggcagaattgtatctctatacaggaaaactatggttgccgatgatctatcactttttaatggattatatttctgatttgcaatctggttggaattctgctggctggtcttggaatggcgaaatcactgattatatttatactgtattaattgttggcgttccattgctattctcaattttgatgcttttcggtaaaagaaggcaagtaatggaagataatgcagatttgattttgaatctaaacggtaggcaaagcatgatttatcagtgacttatattaaagggactataatgtatatgcaagggtaaaataattaagagaggtcataaattatgaaacttaagagaattgtattaagtattgtggctggaactgcgctttttgttcctgcagctttagcgggtcaaaatcaattaacaccggtagttcgggcaagtactctgaagaataagattacaactgttaagagctataccaatccaactttgtataataagaatggtaaagagctaggtagccaagatcggataaattttaagaaaccgatcaatttttatggtcaaccaattgttattcagggacccagggtcagtgcttttattaatcttaatgggatgccacaagctattgttaatggtgaaacctatgcagatttaggtgatggtggttatgtcaacatgaaatcggttggtagctataactggaataataatgagatcggaattattaaaaacacctatatttacaatagcaagggtaatcgtttatcaacttatcgcggtggcaaggcttatttaactaaaggtagcaagattaaatatgctggtaaaagttggactacttatcctgattcatattttaatttaggtgatgggacgtatttaaagtctaataacgttaataccatgaatggcaaaggcgttttgaagctgaatgctaacactgctatttacaataagaatggtaagcgtattagctttaatggacaacaggtttttcctaaatactcaattataaattatgctggtaagcgtcgcactaagacacaaactgacgattactattacacaaacttaagtggtagtaaatcatatgcaattaagaattataagattaaaggtcaagactattattacattggcagaggtgcttatatcaaggcaatgaatgttggtcgcatcaatggcaatccggcatttcgtgatggcggtgcaactacgattgttccgcagacagatttgtacatctataattctaaattaaagaaaactaagcaatccgttaagaaaggacaaaagattagagcggttgatccagttgttctaggcagtggtgatattgcccaactattttacagaattaagggaacatctaactatgtttcctggggtgattatagtgagtatggttttgaagatgatgagcacgtgggctactttaactttcgtgttagattaaatcctgttaaaactattgaaaatgccgctacacgggccgctgaagaatcagattaattgggagtgaagacgttatccatttggatagcgtttttattagattataggaagaggataaaagttcttggtgttgatgtttatacattgctgaatagattagtggtaatactacgatttacgattgttggagagttcgatgaaataggagacagctcaatgattaatgatttactttctgaaattagaatcgatttttggcgtgacatagggttaattattaatgatgaaaagctttttgatcgggtaactgctaattatggctatcatgaaattatgtatcaaaatattgatcattttttcatagaaactaatgacgatgatttcattaaacctaagcgaaaaacaacgtttgaagaaatttatgatttctattgcctagatcaacatataaaaaatgtgatgatgatcagtctgcaattgtttgaacaaagcttcaaagtagcccttgcagaaacagctcttattgagaatggtaaaaatttcaccagaaatcttaatccacgaacaattcatcaaaggcagtttctaaatgaaaaatatcaattaaaagatgggcgagtaattcaccgcggtgatgtgaaagcgcgcatgcggcatattaagcaaaactatcttgagccatatgagggatatactgaggctcatggtgaagcagggatcggactgattattaaagaaatgtcatttggtgttgcaacgaattatttctttttaatgcccatcaaagccaaaaagattgttttaacacgtgtgtttaaagaaaagataactctccgtcaatttgaagaatggctaaatgaaattagatattttcaaagacgagctgcccataacttctcgctgttgattatcaaggaaaaacggcaatttctgtataaattagtactgaataatttgcaccagctggcaaatcaagaaccatgtgaattagctgaggaaagaatcaacaagattgttcaagattatttgacgaagtatccaattgaaaaagattttttgaataaagtttttatggagaaaaaggattaagttgaagttttttataatgatctttcttcaaacaaatgaccataggaacttaaaattctagctaaatcgatccaagtaagactaattgttttggtattatcattgggatgcacaccaactaaattgttttcttccattgctgcttgatcgacaatcaggggaattttattactttgatcattgagcaggctaaatggggaaacagcccctgttttaacttgcagtttttcttctagttcagcttcagtagcgaaggttaaactagaggagagtaattcagctttagctttttgccaatcgatttttttatcttcgggtaacattagtagataataatttttggcgttacgggttttaataaaaagagttttacatttagcaaaatcttcatcttctaagtatttatctgcctttttagttgtaaaaactgctggatgagagaatacttgatagttaatatcatgatcatctaaaagttgtaatatttcttgagtatgcatattttcctcctaataaaaaagtcaggattttcctcctgactgataactatttacgcttttgcttacctttattacggttacgtaagtcttggtgtagttctttcttagcttcagttgtagccttgctttgaccgctattggagttaaacaaagcatccactttttctttagtaacaacagtttcaattggcttatcttttaattcatcggcaatatgcttcttaacactaggtgtaaggacaaaggtaacgattacttgttggacaatcattactaagttaccagcagcccagtaaagagctaaggcaccagagaaggataaactgaagaacaaagtcataattgggttaacaatcatcattgattgcatggtcttcttttgttcttctggaataccaattagtgagatataaccttgaataacggtaaagacagtcgcaataatggctaaaacaacagatttggaacttagagaaataccaaagaatttggattgtgccaattgaggtgaatagaataccgcttgataaattccccacataattggtaactgaataattaatggcaagcagcccattccaccagttaatgaaacttggtttttagagtaaagctctctttgccaagttgataaagtcatttgttggtcaggggtgatccccttgtgtctcattgcattttgaatcaacttcatttgcggttgcagacgagccattttttcctgttgacgtacactcttgttttgctgtactaacatcaatggcatcaagattacacgtacaactaccgtaataatcacgattccccaaccagcaccattatcgccgccaatcatgtgcgcggtttgaatcatgatattttgtaaaggtcggcctaaccattggtaaacccaaccgtaaataccgctgtgcggtgcaacatgtggatcagttgttgccccacaggcacttaatacaagagtagctactgctaataaagccagtactccagcgtatcttttaatttttttcatttaaataaatcaccacttaatttctatctaaaaatgtatgtctctaatataatacatgaaaatcatgcattttttctacacctggaaccgattcttgactaatattttgaatttgggcaaatccagatgcagtaggtagtttttcaataaagcggtcgattttatcactgtctgcttgtaaatagattgtaacggtaccatctgcattatttttaacagtgccaggaatacccatcttgttagctaatgccatggttgaccaacgaaagccaacgccttgaactaagcctgaacaaattaattttcttgtttccatttttatctcccttatttaaattaagttcaactttgattttagcatgatcaaaatagattatcagttataatagattttgaatacaaaaaggagaaaaatatgcaacaaattagttcagttaataatgcaacgattaagaaattagcgaagttaaagcaaaagaaataccgcgatgatgaaggcttatatttaattgaaggctttcacttatttgaagaagcacttaaagctggtaaaaaatatcagtatatcttaggtactgaagaagcacttgatcaagcagatagtgaatatgaagttgatttaagtgggaagaatgtcgtattaattaacaaagcgattgctcgccacttaagttcgactaagaattctcaagaaatttttatggtattaaaaattgatcaaccaaaagaatttccgtttaattatggcaagtgggtgctgcttgataacttggctgatcctggtaatgtggggacgattatcagaactgctgatgctgctggttttgatggggtagttctttcaccagagagtgctgacctgtataatcctaaaacgcaacgtgccatgcaaggaagtcaattccatatcgatttgattaagcgtgatctagctaatgtgatcaccgattttcaggatgcagctattccggtttatgcatcgctgcttgatcgttctgctaagcaattgcctgatttcgaaaaagtgccacaacttgccttaattattgggaacgaggcgcatggcataagcaaaaccattgcttctttggctgatgaaaagctctatattccaattaaaggacaagctgaatcactcaatgccgctgtcgcagccgggattatgatttatcgcttcgcttagcacttgtaattagtaagcggatttactataataatgttagtaatactgaaaaatattttatataatattatttttacagggattatataattatggagggacttacgatgcaagaagttaaagaaaaaaaggatgcagctccttgtaaaccagaagattatgaattgtgctgtcactttgttggtgcttttaagattattggcaaaaagtggaatggtttaattattagttcactttgtgatacccaagatatgcgttttaaagatttagcacgaacgattgaggcatgtagtgatcgagtactcgttgaacgtttgaaggaactagaaaaagaagatatcgtcaagcgtagtgttgatcaaaataccggcatcatttcatatggtttaactaaaaaaggtgctgaacttaagccagtttttgaccaagtacataattgggctgacaaatgggcttagggtattgacattaagtaagaaaaaaagtatattacttaatgtaagttgcttatttaaaataagacaagatgaaaggagtacgaaaatggaatttttaagtataagaaatgttaatactgactgttgttcttgtgtatctaacattgcttttaatactcaagaattcagtttgcgtatgcctaaatagctttaattagaaaataaggagatttacgtcaactgaagtagcgtagatctttttttattgtttaaagagacctatgagcaatgtcattaagttaagacattgacaaattatcgacttggacttttaagatcattcatttgcgatttatcgcatttgaatgctcttttttcatgccaaataaacccaaatcttgtttagaaattaggctacacgatataaataatatacagctgatttgggtttgagatttcttttgtcttttcgtcctggtctgatcggaattgtgtaatgactaatttgaataagaatctttttaaagatttcagttgaagaagaaattatatacatagcctggatgacaaaacatgactgtttgaaattgatcgcatattgatacttgcattttttttgtggtacatatgcttgagcatcaatttgactgactgcgttaaacataatcatgtgggcatagatctccatttcaataaatctatcctgcttggaatgaaactgtacgctacctaaagcatatttcaactttttgaatgaagtttcaatgccccagcgcaaatggtagatttctttgatcctttttaagggataatcggctctatttagattagttagaacaacttcccattcttctttgcctgatttaggatcattaattctaaatttacaggcacgaaattttattgtacataactctccaaagtcccagctgccatctttggtatttttagaccgatattttatatattgacggtaatgatggttaaccaaatgaacgttttctgtagccttatgggtttcataataataattagaggtagtcacccagcaagctatatccttatcacactcttgattaggcaactcagctacttccttaaatgcgccatatcccgttttagtacgtatgacataataacagttaggcaggcgattacaattttcaatcatgttaaagccggtataacctcgatccatagtaactatatatggtccgcaatttagctttttaagcatttgaacggcggctttacgttcatccatctttgacttaggctgaaagatgcagtcttgataagtattatttaacaggtcatagagtgcattaacatgaatttggcaatatggctttcctttatgattgagatttccaacgatattctctgatttaggattccagatttgattaaaatcagacccatcaatggcaaatatacgatatttatgatcaaataactggatattaaataaattctgattaaatacagttagaatatgcttaaaacatgcgggtgaaagctgacctttgcgttggacataagcggaagtactgactactttatcgttatttttaatagctttttggccaaaagctctaaacaactcactggtcaaatcttttccttgcatattaatagtagttttaatgactgtagctgcatctaaaaaccgcttcctagtgaaggcatgaggatcatcgataaaatcatgaatatgctttccagtatcattgataatttgatcaagacgatctaaaatatttctgtgaagggctttcataattaacaccagctttctggcaataattttgaaggtttaataatttaatcagagggcgaaaaggtaggttcttttcgcctttattttatgcaaaaaaagaaccaaatcataatgattcggttctacagagattagattcaatttgtcaatgtcttaacttaatgacattggacctatgagagtgggtctcttttttgtgtgattgggggatttttaatgaattggacaattatccaacaagccttgcctgtgtttgctcggggatttgagctaacgttatggctttcactagttggcattgtgggctcaattattgtggggattattgtcagtctggtgcaatactttaaggtgcctgtattaagccaaattttgacagtatatgttgaattagctagaaatacaccgcttttaattcaacttttctttttatattatgcctttccagtaattggcttaaaaatgtccgctgaggtctgcagcatcattggcttaatctttttaggtggagcatatatggctgaaggctttaccggtggttttaatggcgtaagccctagtcagattaatagcggtaaagcattaggaatgaacaacttacaattagctcgctatgtggtttttccacaaggatttagcctaagcatgccggctttaaccgccaatattatttttttaattaaggaaacttcgattttttcagtaattgcaattccggagttaactaatacagcccttgacttgattgggatgtattaccattcaaatgaatatttattgatgctggtaattgcttatgcgattattttgattccaattattttattattaacttggcttgagaggagagtacggtatgcttcattcggggattaatgttttgtttgaaggaagtaactttgcccgtttgatggcagggctatggacctcgatttggattgcagctttgtcactagtaattggcttggctgtaggaacaatttttggtattttgagaaccttaaaaaatcgtccattgcgttttgttttgcggttgtacttagaattcttcagaattgtgccaaccgtagttttactgtatttggtttattatattttgccaagaagcttgcacgtcaattggccagctacttggatggcggtattagctttctcaatgtgggtagctgctgagtttagcgatattgttcgtggtgcattggaatcagtacccaaaacgcagcgtgaatctggcctagcactgggtctaaatcgcctgcaactgttccgttatgtcttgttgcctcaagcagttaagttagaactaccagcaacaatcaacttggctactagagtaattaagaccacttctttattaatgattatcaatatcatggaagtaatcaatgtcggtcaacaaatcattgaagcaaataatcaacaatatccagctggtgtgttttgggtatatggctttatctttatcttgtattttattttggattatcccttgtctgcatgggcaaaacgattaactgctaagaattaggtgaatgaaatgacagaagaagttttaagagtagagcatttaaataaattttatggcaagcatcaaactttgtttgatatcaactttagcttaaataaaggcgaggtattgaccttattgggaccttctggttcaggaaaaagtactttgctgagaacggtgaatgggcttgaagaatatgagggtggcgcaatttattttcacggtaaaaaaataaatcctagtccgaaggaatggcaattgttgcgccaaaagattgggatggtctttcaaagttatgacttatttcccaacttatccgtgatggaaaatattttattggcaccggtaaaagttcaaaaacgtgatgaagctgaagttaaacaagaagcagttaagttattagagcaagtcggtttagctaattatgcaaaagtatatccgcgtgaattatcagctggacaaaagcaaagaattgcgattgtgcgtgctttgattatgcatcccgaagtaatgctctttgatgagattactgcttcgcttgaccctgaaatggttcgcggcgtgctagatatcatgcaaagattatctgataacgaacatatgacgatgatcattgttacgcatgagatgaacttcgctgcgagaattgccgataaggtgctatttttagaagacggaaaaattttggaagaaacaccaggcaaagaattctttactaaacctcagactaagcgggcacaagaatttttagagagtatggatttttaggtgtgaatgatggcaaaaaagatttttaattggatcatggctgtcctctttgcggtagttgtggtaattgctggttattttggaattacgcgaccaggaattaacggcactgcttcaggcgacagatggaataatgaaaataatgtatcttcaattaaacgtcgtggctatttaagagtggctgtctttggcgatctaccgccttatggctgggttaattcacaaggtaagcgtgttggctatgacgtgcgcctagctcgcagagtggcgaaagatttgggcgtaaaacctaagtttattcaagttaatgccaataattgaattgataccttgaattctaataaggctgatattgttttggctaacttcactttgacaccagagcgtaaaagcgtggctagttggactaagccttatatgaaagtatcggttggggtgatttcccctaagtcagctccgataactagtccaaaacaattgaagggaaaaagcgtgatcgttactaaagggacgacagcagagaactattttactaaacaaaaaggcgtaaacttgcttaagtttgactctaaaactcagcagtttaacgcgattaaaaatggccgtggtgcagcttgggccgatgataattcttatctgtatgcttgggttaagcgaaatcctaagtttactgtcggcattaagacgattggacctaaccagtatatttctggtgcggtaaagaagggcaataagtccttacaaaaatggatggatcgtgaaattaccaaattgaatcgcgaaagcttttttacttacgattataataaagaattgaagccatactttggtaaggaaattaggagactgtcaagaagtttgtgtaaataatctctctcgttgattgacttttttatttatcttttaatcaaaataggattctagggtgtctcgaacttgcccaaatcctttatgaatcctgttaaagtaacggtcattgtaatccattgcctgaactccaataaaggtgtcaagcgactgctcagttggaaattctgttttaggcttggttttccgcttaagcctgttgttaaaggattcaatcatgttagttgagtaaattgaagctctaatagctggcggatagttgtaaaaggttaacagatcaggctcaacctgtctaagatctctaactacgtttttgtaggctttttcccagttttgatagaattcatgcagcacctgtacagccatttctttgtttgactgagtatgaatctgcttgaattcatccagtgcttttttcgatcgtcaacccgcattttggcactgatattacgcatgacgtgtaccaagcagcgttgaaaatgcgctttaggataggactggcagatagcctctttcatgccaactactccgtcagacaagaagagctctacctgttcaaggccgcgactcttgaagcctttgatcattccgttattaatattgcatgattttccaatagctttggttttattcatgatctttttaattggaacagttgacttaatgtcttggactggataccagattctaatttcggagtctgtttctgaaagtgagttatcaaagatttctggagcagttggcctgattagttcaattcaaaaaacatttggaccaggtatagcagctattattgttaacctctttaactatctcggtggcttcatgctagattcgatcagttttggctatttgacttatgttgttaaaggtattgagactacaaataacgagaacaatgataaaaaaaagaagagtatacagcaaaccttatcacaaggtttaaaatttgttttgaaagaacatgatatcaaatggttaattattagttttcttgctgccaatgttggctttcaagtagtaataccgatgttaactttcttattaaaagtacaaacacgtgcttcaataaatgaaattagtatattttttactatctcatcagttgctagtatactgggtaactttgtttatctacactttagtaaaaaaataaagctaggcactcaattaatagttattggattaattattactgtaggattcactattatgctggccattaaatctttattaatatttaccatgggatatgcaatagtatcatttggtagtgtatgggctcaagctaatttctttaccattattcaatctaagacacctgaccaatataaaggcatggtaactgctacttcaacgtctctgacaagaattacaggtccattaatggcaacgctaagtggtatactagtaagaatatctccttccttaatctttttcgtagctattgtatgcttagttttatctgtattaataactctgattagtggtttacagcaattagataagctagccaattaaaacgaaatcataatccatatacagattacttatgtaaccgtaaattctgatcttataggtggaacataagctaaagaaaagaagattatgagatggaatagctactagaatgttgtgttgttttataaatttaaaaataagtgcagtcttctttatatctatttgtgagagatctttataaataaaaaacaaattattttttatgaaatatttatcttcctaaaattcaaaaaatatgagatataaacagtatctttacaaaaagcttgcaagaaacaggtaaaagaaatatcatattaattaattactgagatcaagactagtagcagatattttttctgaacagagagtcttctttcaaaagctgcaagagaagatagaaagaacgctgtgaatttcatcttgggagtaggatctaatcaattccggtatttcaccgttaacgaaaacttaagtgtgggcgttgctacgtccaaactagggtggtaccgcgatgcttcgtccctattggggacggggcttttttgttttgaaaggaaagatttaatggacttatttgataagttaaaagagctccatgaagaagggcttaagcaaatcaacaaggctaaagacgaaaaaactttgaatgatgtcagagttgaacttgttggtcgtaagggcgaattaactaagattttgcactcaatgcgtgaagttgcgccagaaaatagacgtgaagttggtcaaaaggttaacgaattacgtgacttgtttaatgctcaattagatgaagctaaagaaaacattgttcatgcaatgttagttaagaagcttgaagatgaaaagattgatgttactttgccaggtcgtgaagcacatcttggttcaaagcacccaatcaacattattttagatgatcttgaaagctactttattggtatgggctatcaagtagttcaaggtccagaaattgaaactgatcactactgctttgaaatgatgaatatccctaaggatcacccagctcgtgacatgcaagctactttctacattgatgatgaagatttgcttagaagtcagacctcaggtgatcaagctagagtcctagaaaagcacgacttctcaaagggtccacttaagatggtgggaccaggtaaggtataccgccgtgatgacgatgatgcgactcactcacaccaattcatgcaaatggaaggtttggttattgacaagaacgtaactatgagtgatttaaagggtactttggaattaattgccaagcacgtttttggccaagatcgcgaaacccgtcttcgtccaagttacttcccattcactgaaccatcagttgaaatggatgtatcttgctttaactgtaatggtaaaggctgccctatttgtaagtacactggctggattgaagtattaggtgctggtatggttcaccctaatgttttggaaaatgcaggtgttgactcaagcgtttacggcggttttgccttcggtgttggtcttgatcgtttcgctattttgaaatacggtatcgatgatattcgtgacttctacaccaatgacgtacgtttcttagaacaattccgtaaggaggaaagataattaatgttagtttcatacaattggctaaaatattttcttgatttagatggtcaaaatccatacgaattagcagaagaaattactcgtagcggggttgaaattcctgaccgtattcatccaatggatggcttgaagaagttagttgtcggccgtgtccttgattgtgaaggcgttgaaggtactcacttgcacttaactcacgttgatgttggtgaaaacgaacctttgcaaattgtctgtggtgcacctaatgtagctgcaggtgaagatgtgattgttgctcttcatggcgctcgtattgctggcaatgaaaagattaagaagggcaaaatccgtggcatggaaagttacggcatgatctgtggtttacaagaaatcggctttagcgatagcgtggtaccacaagaatttgtcgatggtatttacgtattcccagcagatgccgaagttaaacctggtcaagatgtatatgaagcacttggcatggatgattacattttgaacttcgacattactcctaaccgtgctgatactttaggcatggaaggtgccgcttatgaagtcggtgctattatcgaccaaaagccaaaggttgaagaaaaggttgtcttaaaagaagatggtccagcctggacagattcactcgatgttaaagttgatgaaaagcttacacctaagttttacttacgtaagctcgagaatattaagattcaagactcaccactttggttgcagcgtcgtctttggaatgcaggcattcgtccaattaacaatgtagttgacgttactaactatatcatgctgttaactggtcaaccaatgcatgcttatgacgctaagacttttgctaacggaaagtttgaagtaagacttgctaataagggtgagaagcttactttgcttaatgaaaaagaagttgaccttgaccctaaagatatcatcattaccgatggtaaaaagccagtaatgatggctggtgtcatgggtggacttgattcagaaatcacttcagaaactacagatgtcattcttgaatcagccatctttgatccaactttagtcagaaaggcagcacttcgtcacgctaaccggaccgaagcttcaagtcgctatgaaaaaggcgttaactgggatgccactgaaaaggcaattaacatggcagcgcttttacttagaaatgacgctgacgctactgttgatgaaggtattcttaaggcaactgaccaaaagcgtgaaccagttgtggttaaaactactgcttcatacctcaataaagtattgggcactaagttatcagttgatgaaattgtaaagatttttgaccgtctttgctttaaggtagatgttgatggtgataatttagctgtccatgtaccaaatagaagatgggatatttcaatcccagccgacttagttgaagaagtaggccggctttatggctatgacaaccttgaatctactcaacctgttttgccagaaactcatggtggctactcagaaaaagaagaaatgatgcgccgcatgaaggcaattgttgaaggacaaggcttgatggaagctatttcttactccttgacttcacctgaaaaggccgttcgttacactaaggatccaaaagaattagttgaagttaaatcaccacttaactcaagccgttctgcaatgcgtgagaatttgatgactggattggtagatgctgctagttacaactttgctagaaagcaaacacaattagctttatttgaacaaggcagaacttatgaccatgatggtggtaaattcaacgagcatgaacatttagcagctatttactctggcaatacttttgcggaaaattggcaacatttaacccaaaaggtagacttctactttgttaagggacagttaaccaatttgttcaatgcaattggtattgatcctgaaaaagtggtttatgaggctaaaggcattaaggggatgcacccaactagaactgcaggaatctacattgataagcaatatgttgggatgatcggaatgattgctcacgctgtaacgattgctgataaggcacttcgtggtagcgagctttatggctacgaaattgatctcgatacaattattccaatgttaactaagggcgtaactgcagtgcctgcacctaagttcccagcaattcaacgtgacctttcacttttagttgataagccagttactaaccaagaaattgaaaacgtcattaaatctaatgctggtaagtacttaactgaacttaaggtaatcgatgtttatgctggtgctcacattgatgttggtaagaagagtattgcttacaacttaaccttcttgaacagaaaagatactttaaccgacgatgttgtcaataacgcgatggacaagattgttgctgctcttgaaaatgatcttgcgattaaagttcgttaaaggttgacattattgacgtaaattaatattattgatcagtgcaagataaagaaaattaatttctgaggagttaaaaatatgcctgaaaaatcttatccaatgactgctgaaggtaaagaaaaacttcaagcagaattaaagaacttaaaattagttaagcgtccagaagttattgaacgtatcaaggttgcacgttctttcggtgacttgtcagaaaactccgaatacgatgcagctaaggatgaacaaagtcaccttgaggatagaattgctcaagttgaagaaatgcttaagtatgcacaagttgttgatgcagaaagcgttgatcctaacgtagtttcagttggtaaaacaattacctatactgaagttggtactgatgatccagaaacttacactattgtaggtagtgatgaatcagatccattgaatggcaagatttctaacgattcaccaattgctcaagctttattgggcaaaaagaagggtgaaaccgtatcaattaccactcctggtggcaagtttgacgttgtaattaacgaagttaaagcctaataataaaaagggagggtagctatgactatcttcctttttgtttttttgaaaggattttaaaatgagaacagttggtattattggcatgggccatgttggtgcaaccgttgcctatactttatttacgcacagtatggttgacgaactgattttaattgataaaaatgaagctaaagtaaatgctgaatacaatgacttgcatgatactttggctagaaatgatagctatgttaatgtgcgaaagcaagattgggacggcttagaagatgctgacattattattaccgcttttggtgatattgcggcttcagttaagacaggcgaccgctttggtgagtttgaattaaatgcaagaaatgccaaagaagttggggcagatattaaagaatcaggctttcacggcgttttgatcaatatttctaatccatgtgatgcaattacccaaattttgcaagaaacttctggtttaaagaagaatcgcgtctttggtactggtactttccttgatactgcaagagttcaaagaataattggtgaaaaacttggtcaagatccacgtaacgtagaaggtttcgttttaggtgaacatggttcttcacaatttacagcctggtcaacggtaagagttaacaacaagattgctttccaattgtttggtgatgaagaacaagaaaagattagtgaacaatcaaataagaattcctttattgtggctaagggaaagggctatactagctatgctattgccacttgtgctactcgtttagttcaagcagtctttagcgatgctcatctatattgtcctgtttcagtttataatcctgaatacaagacttatattggttatccagctattattggtcgcgacggcattgaggaagaaattgaattaaagcttacttctgaagaaaaagaaaagttgcaagctgctgcagataagatcaaagaacacttgaagcaattgaagaaataaaaaatagtcattataaaaaaataaggcgagaattacagtcattgtagttctcgtcttatttattgcttattttagttttacatcccaagcggcaatttgcttgttgccgtagtatttcttgtaaatttgcttggtctttttggtctggtatgctttaacaatttcttgataaatctttttatttttatccttagtgcgggcgcaaataatattgatccattgctcagagtctttgttcaatggttcgacaaagatagtttgcttgtcacctagatgtgcagggccagcaaagtcattgttgacgacagcggcatcaacatcatcgatcacgcggctagtttgttcagatgcaacttctttaattttgaagtggttaggattggcagtaatatctgcaacagagaccaatactttgcctttcttcaatttgatcaacccggcatttttcaaaacaaaaagtgctctcgattcattggtgggatcgctggggaccacaattgttgctccttcaggtagtgcatttaggctatgatattttttggaatataagcgaataggtgagatataggttttaccgattgcagtaattccgccatggttggctttgttccaggcgttgaggaaagcatagtgctggaaggcattcagatcaacgtcaccggatttaagtgccttgtcaggttggtcataaccatcaaaacttttagtggttaaaataatcccatatttctgtttgacggtttgagcaacgcttttccagattgcaatgtcacctttgctggcaccaacgattcctacgctaactttggtttgaccgttgctttttggcgtccaaaagaagctgaagtaaccagctacgataatcaataagctaacaatggtgccaataataatattccgctgtcttctttttctcatttttctttctctcatatgcaaaaaaagcacccatcctcaaaggacgagtgcttcgtgttaccacctttatttgccagctatttacataactgacctcaatagctatctaacaatagcttgcattgttaacgagagcaaccccgatactagctaaatatcactagtataatcattctgaatccatcttcattaagtagtttcttttacttctcaccaaccagtaattctctgtaagaaagctagctataattactctattcatcaagattttttaattattgctattaatttatcatctcgttttaattttgtcaaataaatttttttacttagttaaaaagttagtaacggaagaaatagtgagaaaaagtttatttttgtcgattaacaaagtagtaaatgagtgagacaaccgattcagccaacatcccaccggccatccagtacattgccatcatcattttgccggtaaaagtaaagtaggcagtaatggcgtaaacaattacccaaataattttccaaaataagttattcattcctgagcacattttgaagctcctttatttttgactagcaccagaactgctgtcaacttccatgccgcaaccttcggtatccattcctggcatccacacatcttcaggtttaatgcctctttctttagcaaaggcgtcggttaatgtcttcatatccattaacttgtatgtctttgggtgtttagggtcgaatacttcgatttgagccatcattccggcatcttcgtgttcaataatgtggcagtggtacatgaagactccagtttgtgggaattctacacgcaagcggacggtttcacctggtctgacaggaatggtgtctttgtaaccatattcatttggaaatggcttttcgccatcacgtgaaacgactgtaaagtgtgtgccgtgaatatggaatgggtgcaacataccgtgttccttagagttggtattagttacgtcccagtattcagcatgactaacttgttgcttcatatcgatccgctgcattgcgaattgcttgccgtttatcttgttgtgatcatccatagttactttacgaatcggcaaatcttcagcgatttcaggaatttctggtttgaataatgtatcaggaataacactgttgtcaggtgcaaacttgtgaattctaaattcaattagtttgaaatcatcagtataaaggttaacgacatcgccatcatggtaatccttgaagtcaactacaacttgaagccgttcaccaggtgttaccaagatcttagtcattttgattggatgaggcaaaaatgaatcgtcacctgcaatttgagtcataactaggtcatcatcaaagtgcaagcgccattcacgacggttagacccacctaagaatagtaaacgaatcttttgtgttgttacatcaacataagggcgaaccgtgccgttgattaatggtgtttcaccgaagacgcccattgcatcataatcagcgcgatagtcaagttgattatctttgtggaaagtacggtcttgcaaaataactggaaactcgtcaacgccatagtttttaggaattgggagtttagcttcgttttcatctgttactactacgcccatagctaatcccatccaaacttgggcagcggtggatggacatgggtgagcatgaagccatgttaaggcagctggttgattaacagtgaattcgatttgcttttcttcacctggataaacaggggcatgacagccaccatcagtaataggaccaggaacttccatgccatgccagtgataagttgttagttctggtaaactattttttaaggtaacgtgaactcgctggccacgttttaagaccatggttttacctaacaaaggagcgttataaccccaagtcttggtcttagctccaggcaatatttggctttcgctttcaattgattcaagagtgaaccagacatcagtatcagtttccttatccagtgcaagaactggagggacagctaatggctgagcttctacaccttgagggatgcttaatttcttgtagtggaagtggtttttgtcaaaatcttcatctttgataaagtaattagtgtatatcttatctgtcatcttattaactccattcttttgacactaacttagcatgattttttaccgtcttcaaggcgcaagaacgctgttatttaaaggcttgcatgtctattataactatgtaatgaaaaatatttttactattttgtaatcacttatacttaggcggattatgttattttacaagatttgttgccttgctaggcttgcgtgtctccggtaaactaagcatgaagaggtgactagatgtataaaattattgcgtgtgacttagatgaaacgttgttgagcgcagatacgcatgtctcagtagaaaatagagaagcgattcaaaaagcagttgctcacggtgtaaaatttgttcctgcaactggacgaggctacgtttctgtccaaaatactttaaaggaaataggattagagcaggcagctaatgaatatgtgatttcattcaatggtgccagcattacagaaaataagaataatcgcgtgctgtattttgacggcttgcctaatgaaattgcggatcggttatatcggcatggggttgaactagatattgccatgcatgtttacactcaagatatggtatatacgtatcatatcgatgatgatgaacgtgcctatatgacgggacgacaccagtttaaagagattgaagataaagacttgtcatttttggaggggcagaaaattgccaaggtgctctatgagagtcttgataataattatttgcaccggatcgccgctgaattaggaccaattacgcaagaattggatatttcgtattcgtctaatcgctatttggaatttaaccgtaaaggtgtcaataaaggcgcgggactgatgaagctggctgagcaacttagggtgccgattgaagaaacaattgccattggtgataattttaatgacctgtcaatgattcaggctgctggtgtgggtgttggtgtagctaatgtcaatcctgctatgaaagagcaatgcgattacattactcaggctgataataatcatggtgcagttgccgaggcaattgatcattttatttttaacaattgaaaaaaataaaaaaataattgacatattaaaaatacatgatattattgtttacaataaataaaaaaatgagctttgataaggaaagtaacttaagaaatgatttgcagagagtcttcggttggtggaagaagataatgatgaattaagtgaaaatcacctttgagctgaaagtgcgatattagcattttcagggtccgccctctatagcggcgacgtatcgctgattttgatagaatcagccgcacgtgcatgaggtagaatttttgtgagtattattctacgaataaataggtggtaccgcgttgaagacgccctattagatcaattgatctagtagggcgtttttttattatcataagcttgttgttaattttttgacttatgggagagataaaaatgagaaaaacattgaagcacttatttggcacgactgtagtagcacttttaggtgtaagtactttatctgcatgttcatcaagcaaatctggtgctaaagcacctaaacaagaattgacctggatgactacctcagaaatccaaactatggatccttcaaagatggtagatacaactggtagtgaacaggcatctaatgtttttgaagggctcaatagactgaataaagcgggtaaagttgtatctggtgtggctactaaaactaatcagagtaaagatggtttgacctggacttttactttaagaaagaatgctaagtggtctaatggtgatccagtgaccgctgaagattttgtttattctttaagacggacacttgatcctaagacacaatcacaacagcaaaatgagtggtcaaatgtagttaatgcagatgatgttttagctgggaaaaaagctccgtcgactttaggtgttgaagctaagggtaaatatgaattggtagttcacttgaaacatcccgtaccgtattttaaagccttgtcagttggttggaatccgcaaaataaacacgtagtcgaaaagtttggcaaaaaatatggaactgcatctaagtatatggtttacaatggtccgtttgttcaaaaaggctggactggttcaagtcttaactggaagttagaaaagaatgatcaatattgggacaaagataaagttaaattgcagacggttaattatagtgtacaaaagacgccttcaactgattacaatctgtatcaggctaacaaattagatggtgcctatcttgatgttcaggcttcaaagagactgaagggtcaatctggttatacagtctataaactagatagaactgaatacttgactttcaatgtatccaagcatccagaactagctaatgtcgattttagaagagcagtttcaatggcacttaaccgagctcaattggctaaaacagttggtggtgctaataccgtagctcgaacttttgctggaccaaatgaatatgttgatggtaagaattttgaccagtatgttgaaagcaaaaatccagctaataagtatatgaattataaccctgcaggcgctaagaaactttatgatagagcattaaaagaattgggtaagaataagttggcctttaccttaatgggtgacgatgatgacgtttctaaaaaggttttagagtttgtgcaaagccagttagaagatacctttggcaaaaaagttgatgtaactgttagaagcatgccgaagactactagagttaagaaaatgctcaatggtgatttcgaggcagtctttactggattgacttcgggctatttagatcctaattcacaattgcacacaatgatgacaggacaaagttataacttcggtaaatggtctaacaaagattttgacaagtatatgaataattcagataaggaattaaatcctactaagcgattagaagatttgtataatgcagaacgtgttttaactgatcaacaaggattgacgccattattccatgatggtcaagcttggatggttcgaccaagtgttaaaaatgtagaattcttgggtggtaatttcagctttaaggatgcatctgtaagtaataattaggagaaaaataatgactaaaacagcttttgtaaattgtaatttattcgttggtaatgaagataatctagtagataatgcttggtttgtcgttgatgatgaaacaggtaaattgaccgatcaaggtaagggaaaatgcacagcagattttgacaaacaagttgaccttaaagggaaatatgtgatgagcggtttgattaattcacatactcacatggggcttgattctgacttgaagaaaaaatttccgactactgaagcttcgactacttatgcagcactgcgggatctgcgtgaagctttacaaactggtgtgacttatgttcgtagttgtggcacatcctttgatgttgactgtaaattagtgcagatgcgcaagcagtatccttttgaaggtcctcaagtgatgccaactggaatggcaatgtcaattgtcggcggacatggtgatttcaaggtggggttaaatggagagcaaaatgctagtcatttggttaacggtccagaggacatgcgtcgggcagtgcgtgaacagtttgccaagggtgctaaaaatgttaagctgatggcaactggtggaattatgtcattaggtgatgaagttgatgatactgaactttctcttgaagaaatgaagatggcagtagaagaagctcattctaagcatatgacggtttgtgcccatgctgaggggagacgcggtattcattatgcggttgttgcaggagttgattcggtagaacatggtttttatttagatgataatgacttggctttgatgaaaaaacaaggtacatttttgtcaccaacattgactgcaggtcggacaatcgtcgttcatggaaaagatgttgtacctgagttctcataccgcaagatgtgtgcagtagttgatgacttttataatcatgttggacatgcaattaaggaaggggtgaaattggcaatgggtaccgatgcaggaacatacttcaatcgcttttctgatacaccaaatgagttggtggaattagttagagcaggagccacaaattatcaagctttaagagcaggcggcttgggtagtgctgaattgcttaaggttgatcaagaatatggttcacttgaagtgggaaaatatgcggatttcttagttttacgagagaatccattagaaaatgttgctgcagttggtcaaaaagataaacaagtttaccaacatggtttacgtaaattctaaatattttttatcacaaataaagcatcctcgtgagatttttcttgcggggatgcttgtttgtgtagttcaaattaaagtaaacattttactaaattctccagtaaaagcgaataaacataacccaaaatataaaaatagttcttgatttagtatgaattacgatgtagtatttaagccatcaaacgtattactgatgatttgaataagtggagattgaaatgtcaagttttcaagaatactactcagaattacaggaactagcagggtatttactacacaatccagaattaggctataaggagtataaaacttctaaggcagtggaagcagaaattgctaagatttctactaatataaaaatcgaacattattgtaaaacaggacttaaggtaatgtttgataatcattgcccaaaaactattgggattattgcagaattggattcactttatcagccaggtcataaggatgctgaccctgaaacaggagcggcgcaagcttgtggtcactatactcaggtgacaacagccttggctttgataaatgaactgatgaaaaatgatcgtctcaacgagtttggcactaatttggcttttatttttactccagccgaagaatttgtagatcttaattggcgcaaaaagcataagttagctggtgattttacttactttggaggtaagcaggaagccatcaaacttggcgtatttgacgatattgattattgtgtatcagttcatgctataggtgaagattttgagcgtaggactattgaaattaattgtgatttagctggatttaattttcaatactttgacttctttggtaaggcgagtcatgcagcatttgctcctgaagagggggtaaatgcacagagtatagccaccctatttaccactgctttggccttcaaacgtcaacaattaaaaaatccaaatcaaattaggtttaatccagtgatgataggtgataatacagaatcgattaatgtaattcccgatcatgttagcatggggacagatatacgatactttgatgtcgaatatgcacagcaactaatgaagcaattcaatcaagcagcagaaggatgctccctagctttaggcggtaattttaagtcagaaacacaggttggctatttgactttaaggtcgaatagagacatgaatgctttagtaaaaaatgtatttttaaggaatgacaagatttcagaattgattgaaaaccgaggctataccatggcagctggtgatattggtgatgtaagttatctaatgccaactattcagattggatatggtggttggaatggaaccattcatggctctgattttaaattagttgatccagtttttgtactggacatattcccggaatttatctttaacagtgttttagaaatatcaaataatcttaataaaatcaggacttatcgtagaacaaatcaggaatatcttgaacaattaaataaaatgggagcagaaaaatgaaatctttaaaaaattatggtccattaattattttagtgctattgattgacactattgcggaatttatagggatgcaggttttcaaaattggtaaaattgaagtttcaattctaccattagtattcgcagttattttagcgattattatttatttacttccattaaagccgattaagcaactctacaatgataaaagagtaaagtttgctggaaaatatatgattttaataatgttgccactaatggcacgttatggagcaaatgttgcacctaagattaatgaaattttatcagtaggttgggtatttctcattcatgagttaggtaatttaggtacaattttatttggactaccagtagctttattactaggattaagacaagaggccattggctcaacattgggattaggcagagaaggagaactagcctatattagtgaaaaatatacacttgattcaccgaaaggtcgaggagtcctaggtatttacttaattggaacaatttttggttcgattgtcttctcaattttagcaccagttcttttggggatgggctttagttatcaagctgttgcgatgagttctggagtaggatcaagttctatgatgactgcagcttcttcagctttagcagctctggttcctaaacatagtgagacgattctatcatttgcggcagcaagtcagttgttaactagttttattggaacttatattatgtatttcctcgcagttcctttgcaaagattcatgtatgttcacttgactagtttgcttgataaaaagaaagaagtatacccagaacatgattagagaaaataatttttataaattaggtagagatgcattaattttattgcttagtgttagtttagttttatttgttcagtagattaagttagtaaaaaatcctaagagcaccccaattacacctgatacttttgccggcctaggtctattatggctgttttctctgattggcattattatcagtatgttaatgaaacgagttccgtggaagattgttagaggatttcccattctaggctgggtgtctatcgtttcattagttttctgtttgcttagtccatattgtgttcgtgtaattaatgcagtagattttttatcattaactacatcggtattagcctttgccggaatttcagtaactcatagattgaaggatttatcaaagatttcatggaagatcttaattgtggcattatttgtctttttcggtatgtatttcatggatactttgatttctcaaatagctcttaatttgagtggaaaatagaaaaaatatataagtgtctgggaaaaaactaagtctcagatcatgaaaaaagaacgttgaatttttgtttcaacgctctttttgtatacttttagctccagccttgatattattaaatcatcacaaaataaaaaaggtggaaactaacatgtacaagaattatatcacaggtcaaactgctttaacacttaatctagattttgccattccggccaatcatttggctaatgtcatcagctggtttgtagattcaattccagaagatgttttagtaggcaagactgctaaaacgggccgcccagcctatcatccagccatgatgctcaaaatactgctttttgcttactccagaagagttttttctggcagaaagattgagttgatgctggaagaaaatctgccaatgatgatcttggctgaccagcaaaagatttcatatcatactatcaataattttagatcaagcagccatgccaatgaactgattaaaaagagctttatctacttcactaacctgttagaagatgaaggcttaatcaatgaaggtgctgcttttatcgatggtactaagattgaagctgatgctaaccgctatacatttgtctggcgcaaagcggttgaaaagtatcatgaaaagctgaaaggccaggcagttgaactttatgatgaattgattactaaagaagtagtcaaagaaatggaaaaagaaaaagttcaaactagtcaggggctaaaggaattagctcaagaaactgaagcagaaattaacaagctgactaaagagattgagcaggaaaacaaagccattcctggcggttcacctcgaaaagccaagcgacgtggactaaaaaagattctgcaccggctaagaaaagattatgtgccaagaatgcaaaaatatgaagaagccgaagagatctttgccggacgcaacagttattccaaaacagatcatgacgccacctttatgcatatgaaggaagaccacatgaaaaatggtcaattaaagcctggctacaatattcaagcagtcacgaccgatcaatatgtagttgattatgccatctttcctaatccgacagatttcaaaactttggagccggttttggatcaaatgaccgtgttggacaagtttgacaaaatcgtcgccgatgctggctatggcagtgaatacaattattcgatgctggaggaaaaatatccagacaagaagtactttattccctacactatgtatgaaaaagaacagaccaaaaagtataagaatgatccaactaagctaatcaactggtactacaatgaaaaagatgattattacattgatcatcatggcgtcagattcaatttcaaatattacagccagcgcaaggatcgttctactggtcaggtccgtgattttaaggtttatgaggcagacgagttccagctaacgccagaattggaacaattggctaaaacagctagcggccgccagcgccaagttcgctataatcctaactggcaatatttaaaagaaaaagcaaaagaagttctccaaagcgaagaaggcagacacatctatggcatgagaaaatatgatgtagagccagttttcggacatttgaagaacgtatttggcatgcgcagaacgcacctgcgaggtaaagagaaggtcgaaaccgatatcggaattgcctttatgatgatgaatttgaacaaatattgtcaaagaaggtggctgaagggccgatttttattgttaaaaattttaaagagaacaaaaaaacgatcaagattcttaaaaaaggaaatcttgatcgtttttattcatctggaagctagttttttcccagacacttttgaagtgtgtcgggcatgacattcatctagtccaatgaaagcttggcgtaccgcaaggtggaccgctctcgccaatcctatccaatatctatttagataaaatggacaaggaattggaacaaagaggcttgcgctttgttcgctatgtcgatgactgcaatatcttcgtcaagagtggtaagtcggctaagcgcgtgatgaagtcaattacatcatggctagaaagaaaactgttcttaaaagttaacactactaaaactaaagtagttagaccaacgaagagcaatttcctaggctttaccttctggaaaacgggcgaaaactggcaagcaaagccgggagacgaccgtaaagccaagctttatgacaagattagagaattgttgagtcgccataaagcagttgctcaacctctatcattagtctttactaagataaatcaagtggtcaaaggctggggtgcaggcgtttttggctttaacgcaaaagaagtcgcaaaaatgtggcaggaggcctttgatactccgacaagcatctccactgtgatttacgctgttattcctggcagaaagaataaagacgtggtagctgattttaaggatatttttgcttaaatagaaattttctctcaaataacaatccaaacaaaaaagacgagccaatgcccgtctttttattttcttgaaataaatttttagttaaaagttagcttttttaacgtaagtgttcttagaaatacgatagaaagtcttgccgtgtaatttaattgcgcgaccataagtgttaacgcggtgacctttcttcaaaactttcttattagcacgcttgccgttcttcttgtagacataagcattgtgcttcagagtccgcttaacggccttagctttcttggcagctgtctttttagcagcagcggcatcagtttgagtcttgtcagatgtagtattggcatctttattagcagtgtcttcagcgaccttacctaaagtaatatcagccttttcgttcatggtcttgcccataacgttaagaccgaattctaagctgccagcgccttctttataagcatctgctgagaaaacatagtcaagggatgagccgtctttagcaacattttcttgcttgccggctacaccattcaatgttaggctagcaaccatcttagacatgtcttgacctttggtcattggtgctttagagccatcaacgtgaataattacttcggtaactttaccgtctttaacattaacttgagcagagttgcccaagaacatagcagcttctgatggggtagtgctgccagttttggtaatagtcatagtgatagtttgcaagtcgctgttttgactagtagcagtagttgcagcaacattagtagcaggttgatcagctgcagacactacagctgatggtgccaaaacactagcgcttgcgagtaaagcaagtgatgttaaaatgattttagtattttttctcataaaagtttcctcccacgaattttagatatcgcttacattataatcaaataaatgttataaatcaatatattttttgttattttatttttttatgagcataataaactgaataaaatatgaaactgtcaaatcttttgtgtaaatagatctttctcgtaaattgattttttaattatttatttaatcaaagtaggattctaaggtgtcctgaacctgaccaaagcctttatgaattcgattgaaataacggtcattgtagctcattgcctgaatgccaataaaagcatcaagcgactgttcagttggaaactatgccttaggcttagctttgcgcttgatcacattgttaaatgattcaatcatgttagtcgaataaattgaagctctgatctgcttgggatagttataaaagaccagcagatctggttctatgtctttcaagcttctgataacatggctgtaaaccttgccccatttggtatagaagtcatgcaggacagctgtggcttcttctttgtttgtctgttgatgcacctgtttgaattcgttcatgatcttttcacgatcgtcgacgcgtactttagcgcagatattgcgcatgacatgaaccaaacagcgttgaaaatgagctttaggataagtcctggccaaggctgttttcatgccaacaacaccatcagaaagaaaaagctcaacttgctttaagcctcgggatttcatgttttgaagcatatctgtccagacttcaatgttctcgctaggtgcaatgcagtagtcaatgacctccttgtgcccattaggcttgatgccaatggcaatatagactgcttcacgctcaaatgtttctcggcgcaaaggaaggtatgtcgcatccaaatagacgcagaaaaacttgtcgcttagcttgcgtttgtggtaagcctcaacctttggaatcatctgcttggaaatatttgatacctgagctggactgtaatggctgccatacatcttttcaattagatcggctatttccctggtggtcacgcccttggagtaaagcttgataatcatgctttccaagatatccgagtgctgcttgtagccaggcagcgtgtgctgatgaaattgaccgttgcgatcccgaggcacttgcacttcaattgggccaaattgcgtatcaactttgcggaaataagcaccatttctagagttgccagtattccagccatttctggcatagggatcatagcccagaaaggcagtcaattcagcttctaacaagttattaacagcctgttgtagctctttgcgcaataaatcatttattttgtctggattgaatagagcttgagcaaaatctttggtaaaatcattcatgaaggagttcttctttctgtatgtgtttttttgttcaaaccaatcatacgagaaaggaactcctttttctaatgtttaaagaaataaatttaaggaatcattcatccttacacaaactattttacagtctctaaaatatcatcttgaaaccgattgcatagttattttaagaactttataatagaaaagactaatagtattaatagtaaaaagaaggatattagaatgaataaaaagttacttaagttaatcgcaagtagttcggtcgcaatgactttaatggcacctggagtggcatttatgcaaactaatccggttgtaatggccgctgaacaaagtcaaaagacagtgggaatgacggtttacaaatacagtaaaaatcaccgcagccatgctaagtcaatggctcaaggttttgtgggagataaggtgcaattaacagttagtcaaaagcatgtgactaagatgacaatccatgtcgatggtaaaaatagtccaatgggcaaggggcaaaacgtaaataagattgtaaaatccctcaagattaatggcgttagcggtaaaaaggaaaatgtttccgccgacaaatctagttttgactttgtttttgcaggaaaagctttcaaaaataatggttgggtcaagatgcaagtcactattgactttggtggtaagatgaccgaacaagcttgggtgaagtatgacaaggttagcggtttaactactagcaagaaaaagaccgacaagaagcaaaagaaggctagtaaaaagagcgtcaaaaaagttagtaagaaaagtacacacggtcagcgcagataaaaaggttcaaaatatcaattatgcggtctataaggcggatcgcagtggcgtttctgcagcaaataatttttacacgcatcatgccaggattgaaaaagtaaagcagggctatgttatgaccttaaaagttgaggtaaagcatgggatggtgaccaaatttcagccggtttcactgggaattggttcaatttcaaacctgcgttttaccaaacaagctggcaaggatatctggacttatcaggtccacttcaagtcgctaaatcagttaaagaagcaggctcaggggagtctgcgcttgagcgtaccaattgccaatattcatgatcgtttgtttaaggtctggtttgcttttggtgtaaaaaatgtggcgcacagttcgactgtaagcaaggcattaaccgaagcaaatagtagcactgattcaagtagtactagtgatgctattactgcagctaatgacgacagtagtaaagatgcaaaaaatgctacaagtagcgctcaaccgcagtcaaagccagttaaaaagcagcagtcttcttcaaactctagtgtaaaacctggggcaaagatgacacccaagaagaaaaagatggcgacgattgcagcggtggaatatccatttttgcctgtgatcgcaggctttttagcatttgatgctgcaattattggtttggccttttacttaagaaataaaattttgaagagaaagaaataatgaaaaatatagctaaaattatctcttttcctttcttgttgctaacttgtttgtttatttttggtgtgactgttagtgcacaaagcgtgagttatcgcacttacaagtatggcacgcatcagacctcgatggctgatggctactatgcgcgtcctgctcaggttgtggtagacgacaatcagtacctggtaacgatgacgattcgcactaagaaagatctaagtccctatccggttcaggtgttaacgattgatggacaagcaccgctaaacgtagtaaaaacgcggcatggcagtgactatgattatcgctatagttttcgcactaataatttaaaacgtgatatttctagtcaaattaaaatagatgtgccacatgtttaccaagcaacacacaatattacttttgcttttgacactacacagttgcctaagttaacaaataaaaaagagcgagcaagtcatgcggaaagtgcgataaaacgcagcgcgccacaggtgaaaaacaagagtgttaagcctaaggagcaattggcacaaaagaagcaagcggcaatagctaacaggcaaatagcgcagaatgcacgcaatcaacgtgctaatcaacaaaggcagcgaaatttttattatgttattttggctggagtgcttagttcgttaattttaattggcgttgctgttttgattgtcgtaaatgccaaggaaagaaaaagtaaatgaaaaaacgtaaaggattaattattggtttaattatatttttagtagcaatcgtcggagtggcaattggtgctaaacgattgattgatcaaaaagttgccaataatgaaaagattgttgccacaagtgcagcgattactgaaatttttgataaattgaacgttaatttagcaggggttccaaagacgcaggctaagttaccagcacgctatcaaaaggtgcccaagattgggagtccaatgaagccaagtgttgaaaagattgcttctttgaatcccactcgtgtctatgcagtctcaactttaaaagatcagtatgatcaatcatttaaagaacaaggcgttaaagttacatatttgaagctggattcagtagctgaccttgaagctacactgagttcattaggcaagcagtattaccggcagagacaggctgattatcagattggcttaatcaaaaaagccgttaaaaaggctaaagcacgtgttcacggtcgtaagcctagagtattgatcttgatgggcttgcctggcgctaattacatgattctaactaatcgatcatatttaggtgatttggtcagaatagctggtggggaaaatatctatcactctgatagtcagatttatttgtcaccaagtaatgactcgctagctactaaaaatccagatgtcattttgcgattagaacatgctttaccaaatgtaactttgccacaatttaagcaagagtttaagaaaaattctgtttggaagacgatgaaagccgtaaagacaggcagagtttatgacctacagcaaccagactttaatgcttcagctaacatgaatgtttctcaagcattgaataaattaagcaactggttgtaccctggaaagtgatcaaaatgaagaaaaaggtaatttggataaacttgattttagcagttttgttaatcagtacgattttctttgcattaactcacggagcaagcaatttttcaatgcaaaagatgactaacagccaattgaatattttgtttaatatccgtgtcccgcggattatttcggcactagtagcaggagctagcctctctgttagtggtgccttttttcaggcaactttgcgcaatccgattgcagaacctggaattatggggatctctagtgcagccagtttatgtcaattgctagcggttattattttgccagaaattttctttggtaaaattattttcgcgattattggcggactgctagcgtttgggcttcttttattattccaaaaaaagatgacgccttatcagttaattatcatcggagtggcattgaatgcagtgttcacggggatgcaggaagttttcactaatagtcaaaatagtggcagcagcctggccacaagtagttggggatcgacgatgtatttattgattattggcgtagtagggctgattttcgcgatttgttttatgaattgggctaattacttgaaggtcaatgatgaagagctgacgtctttaggtgtttctgctaaaaccctgcgtttagtcttgatgctaattgcagtggttttggccgcaacaacaacggcttgcattggtgttttagcttttatcggaattattgtgccacaggttgctcgtttgcttttgggatatgattatcaaaaaatcattccattttcgatttttgctggagcttggtttttattgttcgttgacaccatcggccgggtgattacagcaccgaatgagattgcggctaatattattttggctattgttggtggtccagttatgattttaattttatggaagaggcagaaaaatgcttaaagcgtcgcagattgatttttcatatgggtcaaaacaattatttaatcaattctctctgagcctgcaggagcaccagattacgactttaattggtcctaatggatctggcaagtcaaccttgtttcgcttgcttacacgggcaataaggccgtctgcggggacaattacgctagatgggcaagatatctggcagctagctgcgaaggattttgccaaaaaggtagcaattgtccaccagcagaatcaattgtatgatcagataactgtcaaggaactggttaaaatggggcgtctgccgtatcattccttgatgggggatgaagaaaatggatctgctcgccttcaacagattatgcaggagctagagattgctgatttggcagataagtttatagcgcaattatctggcggtcagcagcagcgtgtgtggcttgctacagcactggcgcaagagccggaatatctttttctagatgaaccaacaacatacttggatttgcattttcagtatcgctttttggatttagtgaaaaaattgaatcgaaagcagaatttgacgatttgcatgattttgcacgatttgaatcaggctttgcaatatagtaatcaggtaattttgctcaaccaaggcaggattcaaaagcagggcaggccagaagaggtaattacggcgcagacgattaggcaaaactttggcatagattgcgagatgatcgaaactgagcagggaaaagtcttgttaatggcaggttctgaggcaaaataaaagaccacgagaaaactcgcggtcttttttgtaataataaattattacttgttaacttcatccttgaagctcttacctggcttgaatgctggaacgtttgatgcagcaatttcaatttccttaccagtttgtgggttacgacccttacgagcagcacggtgacgaagttcgaaggcaccgaagccaactaattgtaccttgttgccttcagcaacattgctcttaacaacgtcgatgtaagcgtccaaaatagtgttaatgtctgtcttagtagcatcagtctttgcagcgatttgatctactaattgtttcttagaaatagtttccatgaaaaatacctcttttaatataaactacgattacttattttaacagtaatccgcgtatttacaaggggaaacagcctctttaaagaatttttttaaaaaggaaagaaattctatgtatttgaagcgaaaaatattgtattcgctatcaaaaatgtagttcatgtaatgattcttttgttttgatttgaaaaattaacttttttcaaaaaatttagacattttttgcgtaataaatgatgggagacaagcctaaattttgaattccaaattttgtacagtgatggaatatataagagaggtgaataatctttaattacacaaaccacatcctcgaaatatgcttaaacaatatcaattaagaacgttgaagaatggattaagaatggcaggtataagactatgagcctactaacttataaaggttaccaaggtacttatcgaagttgaaaatgatactttatttggcgaagtcttaggtctagaaaatacttttatttcttatgaaggaaattctctggcagagttgaagaaagatttcaaagcgggtattgatgattatcttgagaattgtcaattgaatcatgagcaaccagaacaggctaaccaagatgcagctaagttacagttgcaaaaattattattaacatcattagcgtgattggaacaaaataaagctcgaaacttctacaaattgtagtaacttcgagctctgcattaatctgtttttgttcaatacaacgcatgctattacatattggcaaatcgatctagttcatcatgtgttcctaatgcaaccaaaactaggattagttcatgtgtttctttatcaatccggtagtacaatagccaatcgtcattatattgacgattaacgtgcattttgcgattttttcctacagggtgatctttatgtttggctagaaattctttgtcattggttaatattgcttcaacacaatcatcaacataatccattggataatgttttctttcatatctcttgtaagcgcggtagtagcgcttggtaggattaacttgcatgattatttccgcatggcctttttgtattcttcaaaagagctataacttccatgataaatgtgattatcagcttcatagttcgcttcatctagttctgtcatgggtcttagttctaaaggaatgccattacttctaacaatagctttgaaatacattctaattcctgttgatatgtcaaccccatatgaagcaagaatatcttgagcttctttttttaatttatcatcgatttttacactaatttgagccatagtacaacctctattcacaaaacgtattactttatctatatagtactatatactataaatacaaaatatcaatttttagcgtttgcttttaaaagaattttaaaagattataggtagtcttattatgaatactaggggaaaaaactaaaagtgacatttatatctttaatcgtaatacaccagcagaaatttaaacataaacaaagctcgaagcttctacaaattgtagtaacttcgagctttttgtaactattcagaaaagataatttagcggtcttcgtggttagtgaagtaacggtagtccttactcttgtcgaacaatacggcacgagcgttttcaccgttggagattgagaagatagcgtcagggtacttgttcttaacttcatcttctaccaatcctctaagcatttcgttgttagctaaaactgaaccggttaaagcaatcttcattggcttaggatcttcgtaacggtcaagaccgatgatgatgtcacgggctaacagatgagcttgtttcttaataactttgattgcatcatcgctgccttcatcagcaagttgtgcaacgtgaacagccattcctgcaacttctgggttagacatcttgtagaatttagcgttacattcatccatgtgttcaacgccaaataatttagtaaacatttgaatcaaagcgttgtcttcacgcttgtcccagctaagaagagcagattgcattgctgaacgagcaattgcgtaacctgagccttcatcacctaagatgttgccgtagccaccaactgcgattaagtggccgttttgtaaaccgttgtaaactgagccagtaccggcaattactaaggcaccgtcatcaccttcaagaccagcgtaaagtgctaaaagtgaatcagtaatagcacgagtaggtaagttgttaattcttgatgaaatagttgcggcaacttctggagcattaccgacaactgaaagaccggcaataccaacaagaacgcgcatgcagtcaccatcaaccttgtcgatcaattcgttgatagtgtcagagatattcttaattccgccttcgtagtcagcgttaatttggcctgggccgccttctgcacgaccgatttccttgccagtttcgtcatatgcgattgcagttgagtgggtaccacctgcatcaacaccaatttggtatttaagagccatgttgtaaatcttctttctatattaatttatccgaatgataacgtatacattgtattatatttttatacagtaggtctagtaaaagttttgctgttagcgctaacagtggcttttttcttgcaaattaataaaattgttaaactaattaagctaaccaacatccccagtagaagaacccatggtacataaattaatgtaatttgatgttttcctggattcaacttgaagtttaaaaaagcattcatgaacaaggttttattcttgttaattattttgccattatctaaaactaaccagttaatgttattaggaatagttgacgccaatgtcatcatcttcttcgttgtgaaatgattagatttgatgatcaaagcaggtgtttgtttaaagtttggttgtttttgcttaaaacgatgtataatctgctcgagcttttgtgtgtttaagcgccagaagtgaatgccactaaggtctagtttatctttttttagttcaaaagtaacttgcaaccgttgaccacgctggtggctacctagattaatgagacgggcattttgatcacgtactgccagattaatattagcaccattaactgtcattgaaatggcattatcatcgatctcaccgggcatttcaatgtagtaagaatcatcagtctgtggtttgaaattgaaaatgatgcgtgcgatttgcttattgtttttacgattatattgtagttgatcgtttttcatactagttacattaattaattttgctttaggccaattgatctgcttaaacagctgcacttttgcccctgtaactgcttgaaagaatttggtttgattactagtaatatctagagagttaaaattgattttttgcgttttttgtgatgttaaaaagagtaggggcaaagcggcattatttttcactagatatagttgggaaaagcgtttttgcaaatgataatcgctggcatcaacgcggtggttggaattgtcatacttcatttgcttaccagacttgatcgttgtgatttcatcattaggcaaaagataatatttgattccaagtaaatcatctgtcaaagtagttccgccaaaattagtgtaggaattactattgtttagaaatccaagattgttgatcaggttgagtactttttgatcagaaatcgaattaaaattacttaaaccgtaataaccagcgctaaaaggatcatcatcagaacgatagaaagtcttttcagttcggtaaaatccagaatcatgttgatttgcgtattgtactgcttggctgacattagtggtaaagttctgataatcgctatttttttgataagctaaattgcctagagatagtactaggttgacgattaactcaagctcgataactaaataaaaaaatggcgcggcaaaactgtgttgatgataaataaagccaataaacaagattccgagggctagaaaagctcccgtggcaatctgcgcatcttcagttagaaagtcaaaatgtgaggcattaaatactatataaacaattaaacctaaagaaaatagagtcagaagtccggtctgccaataagctatacgttctttttgttctaatgcaataacgcctagatttagcgcaaaaaagatcaacacaaagctgaaacgaccaggataccagacagggaattggcctaaatgccagagtaaaaccagtggtgtccaaaaaagagaagcaattaagaaaatgagtaaaattccgtttgctaatttacgctgccagttaatctttttgcttaaaaaatataaaattgtcagcaacaagaaaggcattgtcagataaatgttgggcatcccttcctgcatttcatgaaagttataggccccttcggctaacttagtcagctgttcaactggagaaaactgccagcccaaattccatgaggcagtagaactagccttgccttgcaacatttcaatcagaacggggaagagcataaaggcatctaaaaatgaaccagcgatactttttcttaaataaatccagttaaggcgtaggcgctcctgcttattgatgaagaaaattttgcttaacagataaagcaaaccaaaggctaatgccataaatccggtataaaaattagtgaaccaaagcaaaaaggtaattaaaattaacttattttttcgttgggccagcaagcggtcgatggcattaatcaataaaggaagcaaaatcacagaatcaagccacatcagattatagtgattgccaataacgtagcctgaaagggcataagccgaactagccgctaaagcgtaaaagtgattagtgattttttgcttccaatagtagtaggaagatagtcccgccgctccaatttttaatgcgataataattaaaattgcttgtggcaaaaaatgttgcggaaataaaaataagagtagattgaaaggactgcagagataataggcatcagttgctagcattgaaccgcctaaaccattagaaaaggaatagattaagcgcaagggatgggagaacaaatttcgcctgaagaaggcaagaaaatcaacatattgttgacctaagtcgacagtgagcactccatttttgctgtagaaaaagtaactcaagaaaatcaaagccggtagcaaaaaactaagccagaaaaaaatatttttacgattaattgcaatgtgtcgtgagttaagaaatttaagcatcattaaaaattatataagctcccttatgaattgtagaattgatgtttactttttgttaaaatacatctagttttaataaaggtgatttacgtgaattattttagaaaaaatagtgggactggctcaaacaagcattcctcaactccaattagaatgcgaatcattctaggggtaattttagtcctctttgccatgttaattgggcaattggcttatttgcaactagtttatggttcacgtttcaaggcagaagtgcaaaaaactgattcaactgttgtttcgcatcaagtgccacgtggtgtcatgtatgacgctaagggacgcgttttagtaggtaataaagcaaccaatgctattacttatactaagagtgcctcgactacaacagcagatatttacaagatatctaatgccttgagtaattatatcaagattagcgatgaaaagccgacaaagcaaatggcagcagattattatttagctaatgaagataataatactaagatatctaatgctttgccgaagtcagccaagattgatgctgatggcaataagaagacttcagctgaaatctatcaagcggaattggcttatgttgaaaaaatgaatcctcaactaaccactcggcaaaaaacagcggctttaatctttaataagatttcaggggcttatactttatccacgatttatatcaagaataaaggcttaaccgatcgtgaaattgcccaagtaggtgagcacttatcagagcttcctggtgtgggtatcggaactgactggcaaagatcttatccaaatggttcatctattcaaagtatcattggttcggtttcaactgaaaaatctggtttaccaagtgatagcttgcagtactacttaagaaatggttactcacgtaacgaccgggtaggtacttcctatcttgaaaaagaatatgagccacttttgaagggaactaagtcgactaaccaggttattactaaatcgaatggtaatatccagcagactaagactgtttataatggtcaagccggtgccagcttaatgttaacgattgacgctaagtatcaaaagcaagtacaggctactttgaaacgggtttacagtacagctgttggtaacggtgcagcaagatactctaatggtgcctatgccgtggcgatgaatcctcagactggtgctttgctagctgtagccgggattaatcgaaacacgaacactggtaaaacgactgataatgctttaggtgtaattaaccaatcctttgttatgggatcagttgttaagggggctactgttggtggtggattaattaataaggttattactcccgaaaacaatactttgcctgatacggcaatttatttgccaggttcaccagttaaaaagtcagtttatccagttggtactttcagttcattggatgctgaaacagcgttggaagtctccagtaatatttacatgatgtacttagcaatgaaatgggttaaggctagttatgtaccgaagagctacattcatatgccaaacgatgcctttgacattttacggcgtaattttgctatgtttggcttaggtcaaaagacaggcgttgacctacctggtgaagtgtcaggaattgaaggtaagtcatttaatgacaagggtaatattctttccggttctgtacttgacctagcttatggtaactatgatgcttatacaccaattcaactagcccaatatgtgtcaactattgctaatggtggtaagagattgcaaccttatattgtgcaatcagttggtaaaactagcaaaaatggcaagaagatttacattagctacaataagaagccaaatgtccaacaagtaattccttggacgcttgcggaacttaatgtggttcaaacagggttctatcgtgttgttcacggtacaaatggttggggaactgctcacccattgaaaaatgttaagccatcaatttctggtaagactggtactgcacaaactttctactatgatgctgaacaccctaatagaaagcacaatatcgaattgattaatacaacctttattggctatgccccatcgaaaaatccaaaattagcagtggcggttgttttcccaggattagaccctgatggtgaaggaacatacacattgcaagttgccaaagcaatggtacaagattatttcaaacttcattcaacaaaataaagaataatactggtcaaacagcttgaaaaatgctattctagtacagtcagaataaaagtgtaggtggtgaaaaaaatggcagataacatcattttagaatgcaccgaatgtggcgatagaagttacttatctaagaagaacaagcgtaagcatccggaacgtttatccttaaagaagtattgcccagttgaaagacgcgcaacacttcaccgtgaaactaagtaataaaccaagatagcaggttacgtgcctgctattttttgttttttggacaaaaagatggaaaaatcagaattaagaaaagaacaaatcagtaaattaaaagaatttgccaatactaaagaaaaaagagcagaagatgcgattttattagagaaattaatgtctacagatctaattagaagaagtcagacgattggggtaactgcttctttaccactagaagtagatacttctgaattaattgctcgtttgtgggataaaggaaaagaagtttatctggcaaaggcacgaggcgatcaaaatcatactttagactttttacgctatacgtatatgagcaaattggtaaaatctaaattcggtgtggaagaagtcgccgatgaagatgcgaaaatcaataatgatttggatttagtcattgtgccaggtttagcctttgccttagattcgcatgttcgacttggctttggtggaggttattatgatcgctttttggctaagcatgatcctaaaactgttgctttagccaatagcaagatgacgttcgatactagcatttggcctatcgaaaaaaccgatattccggttcaaacaattgttactcctgataaaatttattaaaatagtcacaatgacgaagataagggggattaaatgaatactcaacgaaaaattaacctctcacaatcatttgtgactttaggaattttagtagttttattaataatctttttagttgaagtgtttttaggtggctcagagaataccaatgtcttgatgaaaatgggagccatgaataattttgccgtggtggctggacaccaatggtggcgcctatttacggcccagtttttgcatattggcatcatgcatttggtttctaatgccattattatttactacatggggcagtatatggagccattaatgggacatgtgcgctttttagtaacttatcttttagctggggtcggcggcaatctaatgagcttggctttcagtgctgatcgcggcttaagtgctggtgcctcaacagccttatttggtttgtttggagccatgactgccattggcttgcgcaatttgcataatccaatgattgcttttttaggtcgacaagcctttgtcttagcattgattaacttagcgcttgatatttttgtgcctggaattgatatctggggtcatattggtggcttaattgccggcttcttattagcgattatcttgggcgatcgtgtaatgaagacctacaatcctaagtggcgcgtattggctgctgcagtgttagtcgtatatgttgtttggacggttagaacaggaatgataattaatttctaatgaaaactctctacgatgtacaacaattattagaaaaatacggaattttggttcatgttggcaaaagaatttgggatattgaattaatggctttagagctcgacaatatcaatcgtgccggtctgattgaccaacatgattatttgattgccaagatgattttgagtcgagaacatcgaattgaagtcaaaaatgaacaaaaaaaggcgcttaaagatccgaaaaatgatagccagtaaattagtttagcggtatcataatagatgtaagtttttatgaaagggcagatttagtttatgtcgagttttttaattgtcttagatttagttttattagtcattattttagtcatggttggtatctgggcttggaataaaattcaagctaaatcaattggtggcgaattgactaatgaagaatttaaagaaggcatgcgtaaggcacaaattattgatctgcgtgaaaaagaaccgtttaaacgcaagcatattgatggcgctcgcaacttgccatataccatgcttaagtatcaatatactgagcttagaagcgacttgccagtttatctttactcagattcaaagaccattactttgagagctgcccgttttttaaagaaaaagggttttgtttctatccattggcttaaagatggctttgaagcttgggatggtcgaactaagaagtcaaaatattaaatgaaaagaagacgcatttggagggggtaactctaatgcgctctttttttgtatcaaaattaagaaaggtgatggggatgaaaaaggtactagcgattgtaggaccaacagctattggtaagacagacttggcgattgatttagctaaaaggttgaacggcgagattatttctggcgattccatgcaggtttaccaagaagtggcagtgggaactgcaaaggcaactgcagaagaacaagcgcaagtgaaacactacttagttgatacgcaatccgtttttgacgagtattcagttaaagattttgtggatcaagcaacaaaagcgattgaagagattagccaaaaaggtaagttaccaattattgcaggcgggacaggtttttatgttaatgctttattgaataagatgcagctaggcgagaaaactccagaagagcgtagcgtttcgcaaaagtgggaaaactacctcaaggaaaaaggcgcagaaaaattgtggcaggtcttgaatgagcaagatcctaaggcggcagaaaaaataccagtagccaatagtcgcagaactatgcgagcattgactgtgattgagcgtacaggcaaaaagttttcagagcaacaaaagcagatcgagccccgttatgattacttgattattggcttgaattctgaccgtcaagagatatatcgcaggattaatttgcgtgttgataagatgatggagcaagggatgctcgatgaagcaaaatttatttatcaaaatcgagcacgagagtatcaggtcttgcaagcaattgcgtataaggaatttttcccttattttgaagggcaagagacgctagagcatcgcattgaagatttaaagacagcttcgcgccgctatgctaaacgtcaattgacttattttagaaataaattaccagtagtttggtttgatccgttagatgatccgggttgcgaacaaaagatattgaagaaagtcaaggaatggaaaaatgaataatttgccagaaaaattacaaaaaattgttaaagaagttgatcaacagatcgcacctaaactggttgagattgaagatcaaattgtctataatacggctaaagttttggcggcttaccaagctaatgatgtcgctgaagccgatttaaatggggctaatggctatggcgacgatgatatgggaagagataagctagataagatctatgctcaagtttttcaaactgaagatgcggtagttcggcctcaatttgtttcaggtactcacaccttgtttgtagctctagcaggtaacttgaaatacggcgatacgctaacttatttaactggacagccttacgatactttgcaaaaagtgattggcttgactgatgataagcgtggtactttagtcgagcgcggcgtgcatttttcatatgtgccgttaaccgatgatgggttagttgattatgacgaggctgaaaaggttcttaaacgtgatcagcctaagatcgttgccattcaacgttcacgtggctactccaccagaaagacctttacagttgatcagattaaggacatgattgcctttgttaaacgggtcagccctaagagtattgtctttattgacaattgttatggcgaattttcggaaaaacatgagccaactgagtatggtgctgacttaatggcaggatcgctgattaagaatgctggtggtggtctagctaagaccggtggttatattgttggtaaaaaggacctggttgaaaatgcaaaacttgcattgactgctccaggctgcaccgatgagggcgccactattggcaatttgcatgacttttatgaaggctttttcttggctcctaatgttaccggtatggctgaaaaggggatgatttttgcggctgctttgtttgccaaaatgggcttgaatgttaccccagcttgggatgagaagcgaagcgatattattgagacaattatttttggtgatcctgataagatggttaaatttgtgcaagaagtacagaaaaactcaccgattgattcctttgtaacgcctgaagctgtgcatatggagggctatgaagataagattattatggctgctggtaatttcgtttccggttcaactattgaattttcagcggatggtccaattagaccaccttatgcggtttatatgcagggcggcttgacttatgcgcatgacaaagtagctattattaacgcggttcgtgatacattttttaacaaaaaataaaatttaaaaataatcactagaccaatttgacttttttaaattggtctgctattgtattaaacagttctaggagataagaataaatcataggaccataccaatttaatattttttgtttttataggtgaattaactatgagtaaacaatatactgcagaagaaattaagcaagaagttgaagacaaggacgttagatttttacgcttggccttcactgatattaacggtactgaaaaggccgttgaagtacctaagagtcaattagataaagttttgactaatgacattcgctttgatggttcttcaattgatggctttgttcgtcttgaagaaagtgacatggttttatatccagacttctcaacttggacagtattgccatggggtgacgaacacggtggtaagattggtcgcttgatttgttcagttcacaccactgatggcaagccatttgctggtgatccaagaaataacttgaagcgtgttcttggtgaaatgaatgaagctggattcgacacttttgatattggttttgaaatggaattccatcttttcaagttagacgaagatggcaattggactactgaagttccagatcatgcttcatactttgacatgacttcagacgatgaaggtgcaagatgccgtcgtgaaatcgttgaaactcttgagggcatgggctttgaagttgaagcagctcaccacgaagtaggtgatggtcaacaagaaatcgactttagattcgatgatgctttgactactgctgacagatgccaaacctttaagatggtaacgcgtgcaattgctagaaagcacggtttgtttgcaagctttatggctaagcctgttcaaggtcaagctggtaacgggatgcacaacaacatgtcattatttaagaatggcaagaacgtcttttatgacaaggatggcgaattccacctttcaaatactgctctttacttcttgaatggtattttggaacatgctcgtgccattactgcaattggtaacccaaccgttaactcatacaagcgtttaattccaggttttgaagctcctgtttacattgcttgggctgctaagaaccgttcaccacttgtacgtattccaagtgctggtgaaatcaatactcgtttggaaatgcgttcagctgatccgactgctaacccatacttgttacttgctgcatgtttaactgctggtttgaatggtattaaagaacaaaagatgccaatgaagccagttgaagaaaacatctttgaaatgactgaagaagaaagagcagaacatggtattaagccattaccaactactcttcacaacgcaattaaggccttcaagaaagatgatttaattaagagctcattaggtgatcacttaatgcacagcttcattgaatcaaaggaattagaatggtctaagtactcacaatcagtttcagattgggaacgtcaacgttacatgaactggtaaaaataaataagtaattggaaaatctcgtggtgattgaggccacgagatttttttgtaaagtatagatttttcaaaagcatatctaatcgtaattagtctaattacgattagataagtgaacttatggataagtttttaaatctagtaggataaacttttaccaaaaatcaaaaaatattctcttcaaagaagagcaaactgctatataattgtaataatgactggactggtatccctaattagtttagggatacttttgtgttaatgagaatgtattggagtcgatggaatgagaaataagacattagtagcattttgtttgatagctgcaatgatcaatttaactgcttgccaatcgcaaaagcagactaataatcgccaaactattgaaaaatctggtgtgactcagaaacagactcccaaaagattaattgttaagagtatgtcagatactgaaaaatctagtgcaatctcaatttatggatcgatgaaatatggggatgcatggaagactgcatatagtgatgccaagaaaaatcatttgagcattagtgtaaaaaatcgaactggttttaattggataaaaaaaggtagaggttacatttatgaagtaactggcaatggtcaagaaaataatgctttttatacaatgaaaagtgaaaccgtatatttttataatcagaagaaaaatttaggtgtagcaagtttatctgaaatagcttcatatttaagtgaacataatcaagtaaaatctgtagaaaaattagcaactaagactactttggctgctgaagttacatctgacaaatatggggttaagggtgacgatggcctagcattagttccaacgagactttggggtacttggtacaactataaaggaaagaagttagtaattactgatcatactgttaatggtgaagaaattcatcatatttctaattctggtgtagcagcagaatccttagatcaaacgaaaaagtgggctagagctcggatcgaaaatattaatggattaaattgctatcatgttcaaacattgaatgctcaagattttggcttactttattctgtccaaaaagataatggcaatacggcagtagtaacttatagcgttgatacaggtcattatacggctacttattggaagagcaccaagatagccaaggaacaccgaaatgcagaatttaagactttaaattaatatttgtaaagaagtattaaaataattgcaatgaacaagaagtataatttttgtaaaataatcatgtaagaagttggcggatcgtattttttataatactattaagcaaagagatagaattattgaaagaaaaggggattccttttgaaaagtaaattaactgttttggttgcaatttcagctgctttaactttagcaggatgtagccaaagtacacaaggtaatagtaattcacaatcacagtcagaaaaatcaagtcaagtttctaagagtaactcagaaaaaactggcacctcagaatcaagtaacagtcaaaactcagcaaaattatctgctgagaatatggactataagacgcaggctagtgcaatctctgtctatgctgcacaaaagtatggcgacacttgggaaattgcagttaatgctgccaaaaatggtaatttaggtgttgcgttcagaaccaaagccgcaacaggtattacttctgatgactcaggatatgtttatgaggtctccggtaccggtaaaagcagtaatgctcgttacatgctaaacggagatggagcacaaaagaaaattactatttttgttaagcaaagaaaccttggtactgtaactttacaagatgtagttgattacattaataaaaataatgatgttgatctagttcaaagcttggctaaaaatgccaaactaaatgttaaacttgaaggcgataatgacaatgcagctggtgctaaggaatctgctagtgccgtaattccatcaagcttgcaaggtacttggtacactgcagatactggcaatggcaatatcgatactttgactgtaactgctaataagatcaatgatgaagctggttttagcatggatgtaaaggctaaaaattcaggttcatcaactagttcaggctatatgaaacaagctactattaatggaattaatttctatagttttactaatatgggtcaagaaccaggtcaaggcagtacatatttggcaccgcatactgaaaatggtcaaagtgtaattgtttcagctaactctaagggaacaactaatgctgtctactggaagagcgaagccttggctaagcaaaactccaacaagcaatttagcgatctacagtattaaaagtgaataaaatatagaattaggcgatatctttgtgatatcgccttttttgttgtgaaaataaatttctaaaattatggcacttcctttcaaaacatatgtttgatataattgtaaaagtgtttgggcagactaatgaactgactattgagtaataaggaaaggaattatatggattttttagctcaaaagaaggaataccgttttaaaaatattgaaaatcaagtgtgtcgtgttcatactcatttggctattaacaacaataatttgaaagtttggagagaaaatgatgataagaaaagtagaaaggctactaagttaataatggattcactacaagatgacaataaatacatgtttcctgatttagtaatagttagttcaaaatatttgaaggtagtagctgcttacgatcgcgaaaaagatgttatttatgttaataaaggtatctatactcatcaaattgttaaatcgcatttaaagtcaagttatttcgttgctaaagatatgagaggaattttgtggcatgaatatggatataaattacattgggatgcagttaaaagcttttataaagtacataaaagtaagtataatgatatatattaaagaagcaaagatgttttttgattctaaacttgagcattatataaggctacagtatcctggttatcttaggaaagtaatcagttcgtatgcagaagatagttactttaaagaacataaaataaatgaggtagtagctgagttttctgtgataggaaatacgtgtgataaagaattgaatacaattattagggggatgctagaaaatgcaagtgctaaatgatttgaaaatgccgaataaagaaacactatattttaatgatcatattgtcccttggatagaaaaagaagagtgggctaataatgagcatacagaagtcgctttaacttttaagaaaaacaccccagtagatattattaataaatttttgatttgtcgatctgaattagcctattaactatactgcagattataaaattgtataggaagaccacatgttgtatccatatgcagaatttcctggggaattgtcaattacatattctcaaataatggtagacgataatgtaaagggtggtaaaaagcttttggtccactttgaacaaccgacagattatggatttaaagaagccagatatgagttgcctgattataaagaaatttacaactacgactttacaccttctgaaactagaaataatctagatattcttaagagaaacgaaagtctaatttggaagtgtgccgaagaggagaaaacaagtacctaattattttcggcttaaaaattttactatgactacaattgattttcatgactaataagaagaactcactataagtgggttcttttttaataattacaccactataatatcttaagtaaagctaaaaatgattcagttagaaaagagtaaatatgaaagtcttaaaaaaagtgggattagcgttgttgtcagtgatactggcatgtgtaattatcttctgtggctattatatatatttgtctctacattattatcgaattcctgataatcaaagattgaaaattaataacaatcagtctcagttattaaaagcgggggcgtagctataagacaacgacttataatgttggctttggtgcttataatcatgatttcgacttctttatggattcaggtcagttgaaggatggcaagaaaccgcaggggcatcgagggacagcaatatctaaacaagcagttcttgattccactaatggtgtcattcaaacaatgaaaaagcagaaccctgactgcatgtttttccaggaaattgatactgattcaactcgtagctttcacgttaatcaggtgaaaaaggttgaagatgattttccaaaaatggattcaacttttgctagtaatttccactctgcttttttagcggttccattgaacaatcctcatggcactgtacgttcagggttgttgagtatgagcaaatataagatggatagtgccataagaagaaaatatcctgtttctagtgggcctattgaaaaatttgtcgatttagatcgttgctttgtagttatgcgctttccagtaactaatggaaaagatttggtaatgattaactcacatatgtctgcttatgataagggcggtaaaatgcgtaaggcacagatgaaactgatttcttctgtgatggaaaaagaatatcgacgaggtaactatgtcattgtcggcggcgactttaatcatgcgttagggaaagacatgatgactcattttgagcaccaagaagaaattcctagttgggtatccgttcttgatcaaaaaatgctgcctaaagatttcactatgattaaggcgcaaaatcgcgaaaatgttgcgactgttcgtgctacagacatgaaatatgatcctaaagttaattatatgaccatttgtgatggctttattgtgtcgaaaaacgtgcaagcaaaggcgtataacattaatactcattttgagtatgcagaccataatccggttaggttggagtttgaacttaagtagatttggacaaaatgaaaaacactggatcatgaaactgtagatttatgatttagtatttacgaaattaacttatgaggtaaaatctaatgaaaaaagaattatcatataaaggttattatggttcagtggagtattcattagaagatgatactctctacggtaaagttattgacatcaacggtcttttatcatatgaaggccaatatggggtgaaataagatgagtaagattcaagagttcatcaagaaagatattgagagacatccagaattaaaaaaagaatatgaacaggtagaccttgatttagatgcttcagtattagttaaagatatgcgcgaaggttgggaaatgagtcaataagactaactgaagaatagttagtaaaataatgaaaagcattaaaattatatttgacttttaaaatgatttagactattatcttaatcaacataattattaattatttagcgatgataaggaaagtaaattggcggtccttctacagagagttatcacttggtgaaagataatgatcgacctacttttgaaaatggcctttgagcttgaagctatgaagtttttagtagcttctgggtccgcccgttatagcggtaacgtatcgccagacggccgtacgcaattcaaggtggttttccataaagataggtggtaccgcgttactgaacgccctattagatcaagttgatctagtaaggcgtttttctttttaccgtttttagcaaaggagatttttatgagaataaataaaaaagttgtttcattcggattaatagctttaactacggcaaccttagctgcttgtggtaagcaatcagatagtaataccgtttcaaaaaagcaggttttaaattggtcagagatcacacagctttctacgcaggatccttctttggcaactgatactaccagttttcaagctcttcttaataccggggacggactataccgccttgataaaaacaataaaccgcaattatctctagctactaaggctaaaacttctaatggcgggaagacttatgatttttatcttagaaaaaccgcaaaatggtctaacggcgatccattaactgctaaggattttgtatattcttataagcgtactgttaatccagtaactaagtctcagatggcattctatctttaccagatcaaaaatgcgcaagcaattagtaagggccaaaagtctccggataccttgggtgtttctgctccttctaaatatcatttgagaattcaattaactagaccactgccttacttcaagattttattgtcgtggccattatttttcccgcaaaatcaaaaagtggtgcaaaaatatggcaagttatacggcacgcaagctaaatacacagtttcttcaggcccattcacgcttactagatggaatggtaacaacaagacttggactttaattaagaataagaattactgggatgctaaaaatgttaaattaaataaagttaatgaacaggttagcgaatcaactacgactagctataatctttttgaagcaggtaaggcagatgagactggacttactggtgagcaagttgccgcaaataagaataaagcaggctaccatgcacgtttgtcttcagcgattaaaagattggaacttaacgaaaataaggttccagcattcaagaatcttaaggtacgtcaggcattttctttagcaattaatcgcaaacaattagcaaataatgtcttaaaagacgggtcaatcccagctaaaggcttcgttccatcaggtatgggcaataatcctaagacaggaacaccatttgaagatgatgcttacgttaagagtgcagtatcgtataatcttgctaaggctaagcaattacttcgcgaagggtataaagaatctaagactaactcaattaaaattaccttgttagtttctgatgacgatacttcaaagcaaacagctgaatttcttcaaagtaagctagatcaacttccaggtgttcaaatttctgttcaaacaattccatatactcaattgatttcacgtcaaacagctggtaattaccaagctacaattaaaaactggcaggctgtctttggcgacccaatcaacttcttggacgttttccaaaaaggatcaagttatttgaacaatggttggaataacaatcaatttaacaagctgttgaatgaatcagaaaacgtatatggcaatcaaccagtaaaacgctgggcaagattagtagaagccgagaaggtattgatgaaagaccaaggaactattccattagttcaagttgctaagccacaattattaaagactaccgtaaagggcgtttcctttaaccctacaggcgttccatacgattttaagaacgttagaattggatagaaaaatagccgttgattacttgtataaaaaacaagttttcaatggctttttttctgttttgtgctaatacctaaaaatatccagttagatttcaggtaaaacacttgaacaaaacaaaaacgccttcaataacagaagacgttttctagagtgcgaagtattatgaattatccaattaatctcttcaccataattattatatcaggtatataaggttaattggttaatactatctatgaaatatagttaaatcagatataacaaacgataatcatatcaggctatttgttgtatgcatcgtatttttcatttaagacagaagtaatagttcgagtcattctatcgtgatatttattattctttaaaagtagcgtagtaattacgtctattacatacattattgaaaactgtgagttaataaaccgagcgtcgttaatataatttgtatcttgaacaccaactacaatatcagcaagctgagctaatgggctattgtcatagctagttaatgctacaactgtagctttattcttttttgctagttcaatggctcttaccaaggaatctgtgctacctgttgaagaaatagctataatcaggtcatcttttgaaatgatactgctagtcataaacatattattactttctgtttccgcaaacgcagatatacccattcttagtaatctttgagtagcttctaagctggtatatccagaagaaccgataccataaaaataaactctctttgcagatttgatgagttggattatcttttttaattgttttatatcaagtttattttgtgtttcagatagaactcgattgtaaaaatcatatacttggtgagcggtcgttttagagttatcttgattagtaatagtatttacttgtgaagaagctgcagcagcagccaatttgacttttaaatctgtaaaactagagcagttaactctacgtgcaaatctagtaatagtagcattactaacttttattgttgacgctaattgatttatatttgctgattgaataaactgtgggtcctgtaatataaataaagcaatttttctttcttgctgaggtaaatcgggtagcctattttgtaaatcagttaaaaacgtcatattgaaaaccttcttaatgtgttaaatcaaaaaaacagagaaagattttgtaatctttctccgcttaattatgctaaatttgtagttttttggcaaataagcaattacttattaaaatatttagcgtagatttcgtcagcgccttcaataactttatcagtgtatttagccattggttcacggttgtagccagcatgtacgcccatcttttgcaatactaacttaattgatgggtaaataccgttattaagaagggcagtgataatgtcgttcttcttgtgttctaattcttgtgccttagcaatgtctccgttgttgtaagcagcaatttcttctttaaccattcttgcattaacgttgtaggttgatccgatacagccatcgacaccttcaattaaagcaggtaacaacatttcatcgaatcctgaaagaataagcttatcagggaagcgctcacgaagtctttcaagtaagtagaagtctgcattagtgtacttaacaccgataatctttggatttgagaataatttagcaaagttatccaatgaaagtgaaacacctgttaatgcagaaattgagtaaatcaataactttgcatctacatccttaacgatttcatcgtagtaatgcttaatttcgtcgaaggtaaagttatagtagaaaggagtaactgcagaaattgtcttgtaacccaattcagtaacgaacttagctaattctttagcttcttttaagtttgggccacccacttgagcgatcaagtcaacttgttggtcaacttcgtcccaagcaatttcgaagatcttcttcttttcttctaagccaagcataaagttttcaccagttgaaccgccaacgtataacccgtcaacaccttcaacatcgatatcgtgacgaatgatttcacgagtacctttttcatcaatattaccatcttcatcaaatgaaaccattaaggctgcataaactttttgcatttgtttgacctccgtttagtcaaaataaaataatatttttttaattactgtataactaatggcaaattcaaccaacacctgcagtatagaacatgaaaacgctttacgcaactctaaattgcgaaaataattttcagaaattgaacaaagcgtaggtgtatcaagagatacagagcacgaaaattattttctaaatttttatttgagaaaattgtttttaaatgatactatgaaagcgcttaatataagaacttgattatacaggaaggcgtgaaccaaatgagtaagaaatatttagcttttgatgttggcggaaccacgattaaatacggtattgtagatgagaatcttcagatttcagatagaggcaaagttgatacattacataataaggacggacatattttgaagtcacttattaaagttaccaaagagatgatacagaagtatcaattagatgggattggtgtgagtaccgccggtattgttggagacgatggaagcataatgtatgctggaccaactatttctgactatcaaggtactcccattaagaaagagctagagcggacatttaaaattcctgtcagtgtcgttaatgatgttagtgcggctttattaggggaaaaattagctggaagtgttaaaaatgctagtactatctattgtgttgcattaggaacaggaattggtggtgcattttgggcagatggacatttatttaatggatatcatcaaacgggtaattcaataggatatacattatttgatccaataacatcaactaactatgaacagcggtcatcaaccattgcattacaaaaagaattagaacccttaggtattgatcctattgaagcctttgcacgtgccaaaaaaggaagccttagagaaaagaaaattattgatgcttgggccttgcaagttgcagagggcttaagcagtgtattattacttcttgatccagaagtattagttattggtggtgctgtttccaagcagggagattatttaaaagatttgttggacgaaaaattgaatcagattttaccgccaaatctatgtaaaaccgtattaaagatggcttctttaggtaatgatgcacaactttatggaggtatttctagcatttttgaaaattaatttctagaaagcgcttgcaataaaattgttttcgtgtatgctagaggtgtattaactaatagcaaaattcaaccgtacttatgtgaggcaaatgctgagcataattgtacggtttttttaatcccgtttattgaagaaaagaggcaagtcatgaaagtttcagtgaatgcggcaatctttgttgatcgtttgaatagcggagagagtcaaattgattgcttagaggatgtttcaaatttgaaagataaaattgacaatatccaagttcgtggagaattctttaaagaaaacaccaaagacgacgaactcgaagcaatcaaagcattgtgtaaaaagaacagttggggattgtattattcagttcctgaacaatttttcattgatggacatgtcaataacagtttgaaagacaatgttgaaatggcaaaaaagcatcaattgaagcatttgaagtatttcgtaggtgacgttaaagatgttgaccaaaaggaaattgaggatgctgcgaagcttcttgaagatgctaacgttgatttgacattggaaaatctttctaatgaaacaggctatttaagtactgttcttaaaggtcttgaagcagtaaatcaatatcctaatattggcttcacttatgatgcaggtaattggtactgggttggtgaaaagcctgaagttgcctttaaagaattaaaagataaggttactaactatcatctaaaggatattaagaataaaaaaactgtgatgttaggtgaaggaactacagattgggaaccaatgattttaggacttgatcctcaaattccaatcttcctagaatatggcattgatgataacaagattgaacaagaacttgacaaggtcaatgctgttatagacatgcggtaggtgactttgatgacgtaccttgtacaactatttttgattctgctattaactaaaattgcggcacacttttcagttaaggcaaaaatgccaagtgtaattggagaattattagtcgggattttagttggaccagctattttaaattggattcagcccaccacattcattaattatttttctcaactaggtgtaatcgttttgatgttcattgctggcctagaaggagatttgaaattattaattaaatattgggctccagctttaactgtagctactttaggagtaatttttccaactggtacagcatatcttctgtgccatacggcttttggattttcagtaaaagcatctatatttatgggcttagttttaagcgcaacatctgtaagtattacggttcaagttctaaaagaaatgaatcgtttaaatactcgtgaaggtgcaattatctgtggtgctgctgttgctgatgatattatctgtgtcattttattaggaatttgctccagtatctacggtggtggtcaccatacatcaatcattaaaatgatcattccgatggtattattctttatcattgttttgcttattggtaagtatgttgtgccaaaattcttagatatttttagtgatcttaatgcttctgaaagtgatacagctggtgcgatgattctttgttttggtgcagctgccttagcagttgcaatgggaatgagcgatgttttaggcgcatattttgctggtttagcaatttcagaaactaattatgcagacagattatcaacaaaaattgagccaattggttatgcagttttcattcctgtgttctttgtaagtattggcttacagattagttttaatggcatgggtaaggacttattgtttattgccttactaataattatagccatcttgggtaaacaaattggttgtggtatcggagcaaagatgttccatcttaattggacagaagcaaatattgttggtgcaggtatggtttcaagaggagagatggcactagttgttgctaatgtagctcttcaatcacaattaatagatcaaaatcactatactgcaatgattgttgtcacagtaatcacaacattgattgcgcctattatattgaaacttttcataatgcgaacacaaagaaaagaagtaaaaatgaattaaataaaaggggagaaaaattatgtcgaaaacaggattcggtatgtggaacaggatcgtcttaatcgcatatttgctagcgatgttaggcgttggtgcttactttactaaacgggcaagtaaaagtacagattctttcttcaaagctgaaggtaaggtgcctgcttgggctgcaggatttagtatttgggctactactttaagtgcgatcacgttcatgtcaacaccagaacaagcttttttaactgactggggttattcgattgggacgttaacaatttatttaattattcctatattaattaaatggtatgtacctttcttcagaaaattacaggttactactgcttatgaatatctggaaaagcgttttggaccagtgatgcggtcactcggaagtttgctatttatgctttatcacattggtagagtagccattgttatttacttaccaattttggctattacttccgtttcaaatattaatccaatattgattgctgttttagttggtgcaatgtgtattatttatgcattcctcggcggtattgaaggtgttatttggacagatgttattcaaggtttccttctccttggtggtgctttattaatttgtattttagcagtcgtatatactggtggacctgggaagatcgcacaagttgctgtagataattctaaattcttatctgctaaagattggaatcctaacaatttagctatgttcattccagtaatctttgctggtcaattcttcaatagtatgtatcaatataccgctagtcaagatgttgttcagcgttatcagactactccaagtattaaagcaactgccaagtcactttggacaaacggttggttagcaattgtaactatttttgtattctttggtatgggtactttcttgtattgttattaccacacgatgggaagtttaccaaaaggttttaacactagtgctattgttccatactttgtaattaccaagattccagcaggtttagccggtttaattattgcaggtatcttcgctgctgctcagtcaactattgcttcaagtttgaatgctatttcttcatgtttcgtaactgacttcaagcaaagatattttgataagaaatggaagatgaatgatgttacactagctcgtatcattattgtcatcgccggtgtatttagtttaggaattgctatttacttgttgatgggtaatgcatctcaaacttggaatatcttcctttcaattactggtttgtttggtgttccagttgctggtatttttgctgctggtatctttactaagtcagccaaccgtgttagtgctgtctggggcgtattaattagtgctgctcttacttattggtgtcaagtaatgggtgttgcaacattggtacaaccaattgtagccttcattagttcattcgtaattgcttggttaattggtttggttactccaaaatatgcacatgatatcacaggtttaactgctaaaactatcaatgagaaggttaaggattagttgaaaaaggtgaaactataatgaaagattcaatgtccttaaaagatatggagtcatatcgaggtagattagaagttccagatgattttgatagtttttggagcaaagaaatcaaaaagatagaagcaaagccatttaaattaattaaaagaaattttggcgataatattaaaaacgttgttttttatgatttgttcttcaaaggtactgataacggaatagttcatgctaaatgcatttttccagcacatgaaaaaaatattccagtagttttctatttccatggttacatgggacaagctctcgattgggttgatttcatgcaatatgctgcgataggtgtaggcgttgttgcaatggatgttagaggccaacaagggcagtcggttgataacggtacttatgctggaaataccgttttaggccacataattcgtggagcagtggatggaccagatcatctgttttataaaaatgtatatctagatgtatacacgttaattgaaacagtcgcggatatgtcacgtgtagacaaggaacatctatattcttggggtggatctcaaggtggtgctttatctttgattgctgcggcattaaatccacgtattaaaatgtgctactcaatacccgtttctttctgatttcaagcatgtactagaaatgggtgatcgaggattgccatatgatgagttatttaggtattttaagttttatgatccatttcataagacggaagacaagttgatgcgtactctgtcttatatcgatgttaaaaaactttgctcatagaataaagtgtccagttttaatgtttacaggacttgaagatgatacttgttttccagcaacgcagtttgcaattttcaataggatagaaagccctaaaaaacacatgctgttaccagaatatggtcatgaagcaatgttttattatgttgatagtgccgcatttaactggctatttgatactaagttcccagaaaatccaccggacactagtagtaatgctttagaataaggtaaatttttaggagataaaaatgaaaaaagaagagtttattcaaaaagttcataatggattaattatttcttgtcaggctttacctggcgagccactttacaccgaagagggtggcataatgcctctgatggctaaagccgctaaagaagcgggtgcagttggtttgagagctaactccattagagatattaagcaaattaaggaagtagttcctgacctgccaatgattggtattattaagaaagaatatccacctgagaagccatttattaccgctactattaaggaagtagatgaattagctaaaacagatgtcgaagtaattgcacttgattgtacattgcgcccacgtcatgatggtaaaactgttgcagaatttattgatgaaattaagactaaatatcctgaccgtttattaatggctgatacttctaactttgaagaagcaaagaatgcttatgatgctggtgttgactttgttggtaccactttgtcaggctacactgaagaaagtcctgtttcagatcatccagattatgatttagttaaagctttggttgatgctggaatgccagttattgctgaaggaaaaatccacagtccagaacaattaaagaaaatgattgatattggaccagccggaattgttattggtggtgcaattacaagaccattgcaaattgctaagacatttacgagtgtttttgaataaatgatcttctgattagttataaatttcccctctcccaaaacaagctacgtttgtaaaaggcagacgtagcttgtttatttttggttataaagtcgaatttttatagaaaaagcgaggtataaaatgtcatattttattcatgcaaagaagttttatttagatcatggtgttgaagaacgaggatacttagaaattcaagataatggacaatttggattttattattctgaagatgaaaaaccaaaaagtgctgcaattttagatttcaagaatttctgaaaaacttcttcaatatggtgtaacaagttggatgccgaccacagtaactacttcatctgagaaattagatgaaatttgtaaaacgtttgctgcacataaagggcaggaaaaaggcgcaaagatattaggtattcactttgaaggctcatacttcactaaagaacatggcggtgcagaaaatcctgagtttatggaggatccttcaattgaagaatttgataagtggtacagagattctgatgggatgctgagaaagatatcactagcaccagaacgaaaaaatgtcccacaatttgtcagacatatcgttaaaaaaggcgtagttgcttctttaggacatactagtgcaacatatgaagaagcacgaaaagcccttgacgcaggagctacaatgtttaatcatacgtttaatggtatgaacttattatctcagcatacacctaatattattggctgtgcattaacagctgacgatgtatttgatgaaatgatagctgatggtcaccatataaagccgatcattttgcagatgttgtttgatttaaagggacctaatcatattgtattaatgactgattgcttacgtactggtgggatgcctgatggtgaatatgtgcttagtggtatgaaagtaacagttaggaatcacattgcattgttagaaaatggtaaattagctggcagcacattgactttggataaagcagtaagaaacttagtaaattgggaagtatgtaagccatatgaggcaattaagatggcaacatatactcctgcacgtagtctaaatgaaaactgtggttgtatcctgccagatagggatgctgattttaatgtgctagatagtaatcttaatgttctaaagacttttgttaatgggaaagaaaagtatagcgtaaagtaaaaatattattatagtgtgaaaaaggcataggttgtgatatgaacctacgccttttcttatagttaatgtcttctttatctacttgaataatgattttctaacaggaaattgtaaagaatttgagactgtaaaatagtttgtgtaaggatgaatgattccttaaatttatttctttaaacattagaaaaaggagttcctttctcgtatgattggtttgaacaaaaaaacacatacagaaagaagaactccttcatgaatgattttaccaaagattttgctcaagctctattcaatccagacaaaataaataatttattgcgcaaagagctacaacaggctgttaataacttgttagaagctgaattgactgcctttctgggctatgatccctatgccagaaatggctggaatactggcaactctagaaatggtgcttatttccgcaaagttgatacgcaatttggcccaattgaagtgcaagtgcctcgggatcgcaacggtcaatttcatcagcacacgctgcctgactacaagcagcactcggatatcttgtaaagcatgattatcaagctttactccaagggcgtgaccaccagggaaatagccgatctaattgaaaagatgtatggcagccattacagtccagctcaggtatcaaatatttccaagcagatgattccaaaggttgaggcttatcacaagcgcaagctaagcgacaagtttttctgcatctatttggatgcaacataccttcctttgcatcgagaaacatttgagcgtgaagcagtctatattgccattggcattaaacctaatggacataaggaagtcattgattactgcattgctcctagtgagaacattgaagtctggacagagatgcttcaaaacatgaagtccagaggcttgaagcaagttgaactctttctttctgatggtgttgttggcatgaaaacagccttggccaggacttatcctaaagctcattttcaacgctgcttggttcatgtcatgcgcaatatctgtgctaaagtccgggtggatgaccgcgaaaagatcatgaacgaattcaagcagatacatcaacagacaagccaaaaagaagctgcagctgtcttgcatgaattttatgcaaaatggaataaagcttatagccatgttatcaaaggtttgagggaaattgagcccgatctgctggtcttctacaattatcccaaacaaatcagagcttcaatttattcaaccaacatgattgaatcctttaacaacgtcatcaagcgtaaagctaagcctaaggcagaatttccaactgaacagtcgcttgatgtatttattggcatccaggcaatgagctacaatgaccgctatttcgaccgaattcataaaggctttggtcaggttcaggataccttagaatcctattttgattaaataaatgattaaaaaatcaatttacgagaaagaactatttacacaaaagatttgacagtttcgattgttactactggtgccggcacaccaaaaccatatatgtctgatttaaaagctgctggaattaaggtaatgccggttattcctaatgttaagattgccaagaaaatggaagaaatgggtgctgatgcagttatcgttgaaggtatggaagccggcggtcacattggtgggactacttcaatggtattatggccacaaattgctgacgcaattaatattccattaatcgctgctggcggtatcggtgacggtcgtggtgttgttgaagcatttgttgctggtgctgaaggtgtacaatgtggtacaatcttttcaattgctaaagaaagcccagtaggtgataactggcgtaaagctgtcatcgatgctactgatactggtactgctgttgttggctctactatcaagggtggtgctactcgtggtattgctaatgaggaagctggcaagttgtttgaacttgaaaagacaggcgtatcaagagatgaatttaattcagcattgaacaagggactatacgttggtgtaagagaagatgaccctgataagagtttctttatggctggtgaagttgctggtctaattaaagaatctaagcctgctgcagaaattgttaaagatttaatggatgatgctcaaaaagtattgaataaaaacatcgaaatcatgtaatttaaagccattttatggctgtggaattaatacataaaatatttataatcaagcattaaataaaggcgaatgtaatttcgccttttttattattattataagttataaccaatagttatgataatgctaaaaattaatgatttcacaatgctagatgtaagcggtaccttataagtgtcaaggaattaaatgattccaaaattctactaatttgaaacatactctcatacatattattaaactcatctggtttccaattcagtagaaacgtagttagttagatttaaacataggaggataaatctatgtctgttaaagttattgacagtaaaactgcagcagaattggtcccagataacgctagtgtagctcttgatggctgccttggcactgatgtcgctgaagaaattcttgaaatgatgaaaaatagataccaagaaactggacatccaaaggatttggatgtttggtatggatgtggtatcggtgataacaaaggctcagccgttgaaaactttgctgaaaaaggaatgctccgtcgagtagttggtgggcttgggtcattagcgccaaagcttgcaccaatggttgcggataatgattttgaagcctttaatttcccacaaggtacaatttcacaattgtttagagatgcagctgctcaccgtccagttctagtaactcatactggattaggaactttcgttgacccagaaaatgatggtggtcgtttaaatgaagctgcaaagaattctactttggtaaatagaattaagattcatggaaaagattaattagcttatgaaacaccaaagccagatgtatcaattttccgtggtacttatgctgatgaaaacggcaatatcacatttgatgatgagcctttaaccatggatgttactgctgttgctatggcagctcacaacaatggtggtaaggtaattgttcaagttaagcgtgttgttaaggctggtagtcttgatccaaaggccgtcagagttcctggcgttttagttgattatgtagttccgactgataatcctgaaatgactaaacagactaccgattacatttacaatccagatattattaagtctaatattgtaaaagacgttaagcaaatggacttacctcttgataaaaagaaggttattgctagaagagctgcattcttattcaatcctgataccgaccattgtgtaaacttcggtattggtcaatatccaatgtattgcgcaatggttatgaaagaggaaggattatctgacaatatcgtaactactgttgaagcaggtacattcggtggcacttcattaggtggtggtagttttggtacagctattgctcctcaagctactattgatgaaccttacatgttcgatttctacaacggtggtggacttgacgcaacttacttaggtttagctgaagctgaccaatatggtaacttaaatgtttcaaaatttggtcctaagattgccggtactggtggtttcgttgatattactcaatatacacctaagattgtcttcactggtacgttcactgcagctggacttaaggaagaaatcaaggacggtaagttaaacattatccaagaaggtaaagtaaagaaatttgtaaagcatgttcaacaaattaccttctcaggtaaagtcgcatatgacagtaatcaagaagtttggtatgtaactgaaagagccgtatttaagctagttaaaggcggtattgaattactggaaattgcgccaggcattgatttacaaaaagatattcttgatcaaatggaatttaagccaattattagtgacaatttgcaggagatggatccgagaatttttcaagagccagtcatgaatatcaaaaacgataagaaatagttaagtgttttaattcatagggggatgcaaagttggatattaaccaaatccgttatttgctcacaatagcagataatgactttaacttaactcgtagtgctgaagtcctccatatttctcaacccgctattagtaaagcgattaaagatatggaatttaagcaacaagtaaaaatctttaatcggcgaaagggtaaaatcgttggattgacacgttacggtataactttagttaaggaatctaaaaaagtgtatgaacaatatattgaaatggtttcgaaactaaatgaattatcagaaaatagtaacggaactgttagattaggtattgcaccagttattatatcgaccgtgttcaatgatgcgttaatagcctttattaaccaaaatccaggcattcaactaaaaattatcgagcgtggagcttatgaattacaaaggatgttgattttaggtgatattgatctagctgtgattgtttctccagcgactgttgaaggtatttatgaggatttaatatacgaaaatacagttagggtttggtttaataaagaacatcgttttaatgattttactggtccgattccattctctgaaatagaaaaagaaaagattgttactctgacagatgattttatggttacctttcaattgaacaaaagatttaaaggtgataggctgaaacctaattattttcttcaaacacaatcatgggatttgattttaaatttagttcaacgtgataagaatttaattggtattgtggctgctccaataggaaagaattatagtgatcatgcaataaagaatgctgaaattacacctgaatttccttggaagatatcgatttgtcatactatgaattccactgaagatccaacagtagaatacgctaaaaattggtttttgaaatacttttctaaatataaaaagatatcaattgattaaaaattaaggaagaatcattatgaaagctatatttccaggtagctttgatccaataactaatggtcacttagatatcattagtcgtgcttcaaaattatttgataagttagtcgttgttgtttcaaataatacctccaaaaatggtatgttttctcctcaacaaagatatcaatttgttaaagacgctgtgtctgtttatcctaatgtttccgtgagccttgttcaaagtgatttaactgttaatttggttcatgaattaaatgctgatgttattgttcgtgatgtgagaaataatgaggactttgtttatgaacaacaaatagcattaatgactaagaaaatggaccccaatatagaaactttgattctattttcaaaccctgaatgttcatacatatcttctagtattgtaagagaaattatgctatttggaggcgatatttcagatgctgttcctgcttgtgtaaatcgtgctctaataagaatgaaaaatcaacatatggcaaggagcgtatcattatgaagactagaaaagaaattaccaatttaacgatcacagctgtatttattgcattgctttttatccagacatttgttccgaatgttgggtatgtaagaattcttcctagtcttcctgcaattactactattccattaaccattgctgtttatgggactttaatgggaccgaaatggggattgggttttggattagtttggggaattactcgtttagttgtggcctatacacaaccaggggatatggtcagcttgcttttgttccaaaatccagtaatctctcttgttcctagtgttctagcaggattctttcctggattaattagtcagaagtttaaagatagggatgcacatattcaaaagatagggtatatgctcagtggagcagttgcttcgctgacgaacactattcttgtaattttacttaccgatttaatgtttatgtctaattcaagcaccttaacaagttacttagggcatttttgtcagtcaactccattgttggtaattctagtcactgctctaggtttcaacggcttggtagaagcgatatttaatgcaattcttgtccctataattgttacacctcttaatttggtacttaaaagagcgtaaatgatgaataattttattactgttgaccgtaatcactggactaaattaaactctaagattgagcttccttcttatgaactattaaaaagttttattgatcaaaataagttacaggttacagtcaatgaacttcaagaagtatatatcctattagttcaatatatattgatttgcgttcaaaataagaaaatgttctctaaattaaagacaaattacattaagagtgctgatttaaaccagccatttatcctgggaattactggatcagttgctgcaggaaagtcaacgactgctaaagtaatagagactcttattagtcaattttactctgatttagatgttcaatcattgacgactgatggctttatttatcccaacaaagtactggagcaaaagaatttaatgtcacgcaaaggctttcctgaaagttacaatgtatcactattaaatgattttctttctcaagtaagtgatggggtagaggaagtttcctatcctgtatactcacatgagctttcagacatagttcctggtaaatatcgtagcattaccaatccagatattttgattttagaaggaatcgatattttgcaaattcctgaaaatgaagagaagattatcagtgattatatagatctatccatctatattgatgccagtgaaaacttattagaggaatggttcttaactcgctttaaatgtttgctagatattaataaagataatcctaataatttcttttatcattgggctcatattcctttagatgaatcaattgattatgcaaaaaaggtttggcggacagttaatttagttaatctacgtgactatattgtaccaaccaaggaaagggctaatatcattctttataaagatgtaggtcacagagtaacatcaataaaaattcgaaaatattagaagtatctctttctaagcagttcatgagaaatcatggactgcttttggtttaatgtccgtgatctcatcggggtgcaaaacaacatatacgaactagatccacgatagagtataattaggttgaaaacttaaggcagaatagttgtagagtggagggaaaaatgacaaaatatgtggtaaatagtgaattaagcgatactgaatggcaaattgaaaattcaactgccagatatcgctttatagctgacaatggtgataaaactggaggccctgatcctgttgaatatttaactggggcattaaattcttgtatgtctatttcagctggattgcttattaaggcgcaccatctggacgttcaaaattttaagattaatgcggaagcgaataccgagagattatcacacggaatgccagatgttgatacgataactatcaaaatatcatttgatagtcctatgtctcatgaagatcaagataaatttgttaaagatattttaagagtatctactgtctatcaaacgttgaaaaaagcgatcaagattagtattgagtggaattagcctaagttaaaatgactagtacgaaagaagcactgaagctaaagacaaataattctaaatacaatgcagtagtaaggccatactgcaatatcaattaataaagcaaccagtgtagataaaagatctatactggttgcttttgtttgatttaagttagtgacagtatcattaagttaagacattgacaaatttgacgcttttggaaccgaatcattttgattcggttctttttctttttacaataaaataaagagtgagcagaagtctatatctgcttactcttttgtctcttatcaatttttttataaaaagagcgtagttctcatgaaatcccttcacacaaacattttaaaactgatgaatcagattatcgataaaattcaaaattcattattgacaaaacaataaaataagattagcataatattaaaattatttaagaaaggagctacatatcatgttagaatcacaaaattcagcaacagtagaattacgccgccgccaccaaaatgatggtttattttgtgatcctaaattatggtgtgcggcgaattttgtttaaaaataattaattaagttgattactaagcaaggttcacattcctaattgggatgtggacctttttttgttacagaaaagagaaaaaactatgaagtcaattaaattatttggttcaactggtctacttattggtgctgctttaactttagtagcatgtggtcaaagcaatacaaatgcagcaaaaagtgcaaagaaatttcctgaacaaactgtacaaaaaactgcacagaaaggtggcactttaaactacgcaatcgaaacagatacgccttttaaaggtatttttgatagtcaattatcagttgatcaagttgattctgatgtcatgcaatttggtaatgaggggttattcgatactgataattcatatcaaatacgcgtggtgctagttaaatcgttttagttaataaaaaagtccaatcggattagactcaagttgtaagtaaattaaatagaaaagagtctgatctaattgaactacctcaagcttaatcgtttctctcaccatttacaagttagttttagtcgtttaaatgtaatttgtcgttcactatataatctttatgcgcctgataagcttacgcatcgaaaaaacattgatcaaacaaagctttccgacagctccatcttagcgatgctcatttggcaaactgaaattggaattgaatcccaaagaagattctgtaaattttttgttggcttatctcattctcgctttaatcgtcgagccaagatgcttttgcctttaattcgctgcatccgtcaagcttggaatcaagaggtaaaggttgctggagaatttttaattattgacagttttcctgttccagtttgtcagcctgttcgtaattatcgtgttaagatcttccgtgacatagccgatattggctataaagcaaccaagaaagtctattattatggtttcaaggtgcacgcgctagtaagcgatgatggctatttgcttgactacgcagtcactaaagcatcagtgcatgatgccaaagaaacagtagaattgatgattaatgctcatccaattaaccattatcttttaggcgatgaaggctacttaggaaaagacttagctgccgagttaaaaggtatgggctatgtcctttggacaccatatcgaaaaaacatgaaaggtgctaaaaaacataataatcatcaactgatggcaattagaagaacaattgaaagcgacttttctttgctcagttactataacgctgaaaataaccgagcaaggagcttagctggctttcagcagcggctagaaatagccattttagcttataatatggcatattgcctagaacgatttaactagcaccacgcgtatatcaaattaataataaaggacctgctacttttaaacttgataaaaatgcaaagacaattactattacggtaaaaaaaggtgttaaatggtcggatggtaagcaagttgtagctaaagacttagaatatccatatgaaatgactgccaacaaagcaactaatagtttacagtattcagattctttagaaaatattgttggtatgaaagcttatcacaatggaaaagcaaaaactatttctggtattcaatttcctaatggtgaaaatggcagaaccattgtcattcattttctttcaatgaagcctggtatgttgcaatcaggtaatgattactttattgaaactgctgctccgtatcattatctaaagaatattcctttcagtaaattggtttcatcagatcaaattagaaaaaatcctatcttttttggcccttataaagttagcaaggtagttagaggacaatctgtaacttaggttccaaataaatattactggagaggtacaccaaaattaagcaaaattgttgctcaggtagtttctactaattccgcatcccaagctattaagagtcataagtttgatatagccgatgtggtaaattcacaatggcaagcagttaaagatgcgaaagatacaaaattcattgctaaaattcctcttgcttacagctatctcggcttcaaagtgggtaaatggcaagatggtaagaatgttatgaatcctaattctaagatgaatagcaaatctttacggcaagcaattgcttatgcaatgaatattaatcaagttgaaaagagatacacgcaaggtttgacttttagagtgccaaccttaattcctgaacaatttggtgattactttgataaaaattctaaaggctatccttacaacttaaagaaagcaagtgaattgttagataaggcgggatataagaagaaaggcaaatggagagttcaacctaacggaaaaccattgagcattcatttagcagctatgagtgggtccgccgttcaagaaccaattattcaaaactacatccaacaatggagaaagattggacttcatgtgagtttaactggaaacagattaatggaattcaattctttctatgataagttagaccaagacgataaaaatatagacatgtttattgcttcctggtcattgtctagtgaaccatcacctagaggaatctatagtgaaactagtgcaatgaatgactcaagatttgtgacaaaagagaacaacaaattactcaatgaaattgattcgtctaaggcgtttaatcatgcatatcgggttaaggcctttcataagtggcagcaatatatgaatgatgaagcttatattgtgccaatgactaattcttactccattaaggctgtgaatagcaagctggttaactattcacttaaaccggctgaatcaaattcgatttggtataaggtgggatttgctaaataatctttcttaagaaaaattcccttccagatgattgaaaacgatcaagattttcttttttgagaatcttggtagttttttatgatttgtaattttataaatgattaggcagtttgaagtctatatgtgtatatttaaattgtataaaatctccttaaatgctgatataacaaggattatttaatatagctttttagcctaatgaagataactatggttatatttatataatatattatatattttagagcagaagtaaaaaaattcgaaattgtttattaattatctgaaaattgaaagcaccaaaatcaagctcaagtcctgtcactattgagctttcttagacgtaattagtttttatatgatctgtttcagtgcaatttgtatgaatcgtggcagttggttaataaagtcattgattacttcatctatcttttcaaaactattctgtttaagctcttttaattctgaaattaagtagaccaatgcatctacgaatctaatatcaggtaaggattcgttcattagatagaataaatctccgattgtcttatcatctgtattttgtctttcctgccaggtcaatagatcataagttattgctgtaactgcgatatagccacattggccatcatagctttgaacttgagatttatctaaagcaagatattgcttagacgtcttaaaatatgtttcaatttgccatctacgaccataaagttggatgatttcttcagggctaagctttgtctgagtagtagctaaaaccaaatacttgttcttgtttccacggttggagacaaagacgagctttaataaaaagctatgtccatgatattgagcctcaactatgcttgaataaagataatgtttctttttacggatgtttgaagcagccaaacgatcatacaagtctttaacgctatagcggcaatggcgataaatgtaataaatctttgaactcttcttgatcatgccaagtccatctaaaccgatcttctttaaaatccaaaacattcttggagaagaaaaccaagaatcgaataagacgtatttagcttctactcctaatcgtaaggcttgtctaatcaactctacagttacatcattcatctttctctgagcttgatttctccttttaccagaaattgaacgttcatcagcagtaatgggagcagctccaatcatatttttcttggttttggttgacatcaaggcaaagttaaccggcaagaaggtattgccatcgctccagcctaaagttaaaccacgatatccgttcaaatactcatgcttgtcatggtcatagactttagctagcaattcggtctttttagaaaaagaccgagccatcagcgtatcgtcaacgataaaagcaagtcggcgtcttttatcgataaatggttttaagcagccaatgagccgggctgcaatcaagcataatagtttttgcagttgattcttccatcgttaagtacattgcgagcagttctaacggaaaaacgtttgtcatccttagctctgaataaagaaagccgagcaaaatgtactgacatcagccaagagataatcatggttaatgaaacggtggatttacgcttaaaattgacttgtttagttaacttagctagaccaattagattaataaatgaagaaattaaggatttagtatcgttttctgtgtcgatttgttctatactgttcattgcgcaggatctcctttactttttaggtcgacacttaaagtataacgcagagagatcctgcgtttttatttttgataagaaaaagccaagaggcgcggggaaagagcgttaatcttagctttcaagtttcagttaattatatagaaatggttatttaatttgcttaacctaatgctatcgcatttgaaagagctttcaatatcttttaagatgttatctaggtttgttattaaatatttacgcatatagacttctttatttaacctgctaccctattaagtgaagagacttataacgaagtttaagaaaccgactacttcttaaataaatgagtttaaatttaaagcttgaaaataataaggacttaaaaatttcgagctttcataaataataaataggggattaggaaaatgaaaaagagcattaaacttttatcaacaattagcattgccgttgctttagcaggtggtgcaattactgcagttaacaatcaagaaacttcaaatgttgatgctgcatcaataacattaccttctggttacaccaaggatgccgttatcaaatggaaccaaactggtaaggccagcaaggctttggtaaatgcctcaattaagggtatgaaagaaaataatgatagtgatgctggttcagacaacaccttggttaatgtaactaagttaactgatagtcaaaaagttgaattaagcaactacactttggaattgattaattctgctcgtaatcaacttggcaagcaatcttggacttacaagcgcggtgcattaaattttgctgaccgtgtagctaatcaatattactcaaacaacaagtcttgctgggatcctgatcactatgttactggtattgaacgtgcagccaaggcttcaggtcttaactcacgtgttggtcaagtttacgaagatgaagcaggtttgccaatttcttcagaatttaacaccaactaccgtacaatgtcggctttgaagagccaaatctacttcaacgttaagcagatgctcttcggtggctttgctggctcaagtagccaaatgggcgatgcttctaagtatactgaatgggaacacgctggcgacttgcttggctgccgcactaagcgctacatccaaaactacaagaaattcaataattaatctgacgttgtagtttgaaactaaaaaagtttcctaatccaagagttcaaacggtttagtcacctgtctgggctctttttaatttgcttaagaatattttgaataatatgattaaatttctattatgtgagattttttcaaaatgtggttgactgtaaacaacaaatagtaaagaatacagttaatgaaaagcgaggaagaacttcataagttagtggaaaaggttattgatgattttgctgcttgggatgaagatgagcgctataaggagccagaaaaagaactacgtcagctgttggaagatagtaaggtcttgggctttataatgtacactagattgagtgatattctgggttggcatcatcgtatgttgactgaagccaaggaagagagaaccttaacagctaaggaggaagtattactgaatgacatggatgcagttcatgatttgatggaacgaaccatggatgaagagaatggtaggttgtagaaagcattaaaattacagaaaaataaaaccacattgctcaaaaattgaagtgagtaatgtggttttttacgttgtaattattgtagtagccaatcaataagattgattttttgaatcccgtcgtagttggctgtgggattgatagtatcaagggttagtaaaagtttggaatgaactccaaacaaatgacatttattgctgctttttggagtcaactccaaaaagctgactttatcgttttgatggaattgaataggggcaagggagatattgtaaaagcgagtgtcgagtaaatagtgaactgagacctaaaagttagacacttttaggtctttttctacgtaaagtcaagcataataagaagtttgacttcattttttgtttaaatttcaacttaaacatcttttagtgtcgatttatttttttagttagacacgacaaataagcccagatccatatctgatttttgggcttagcgttataatgtacttgatcaattaattacgactaaagtctttttgattatgtgtggctacgttgtaatcatatggttgatcattgataatcagggcataaatggttctgattagtttatgaattgaagcaatagctatctttttgaaccctttggtttgagaggatagctttttgctttcataataatctgctatatgacacggatttgtcttagctgcattatcaatttgtccaatagctcgataaagcaacttacgtgcgactgcattgccatgtttagtaatacttaaattagagtccatttctcctgactgatatctgcctggatcaattccgataaaagcattgattttattaggattactaaatctgcgtaaatctcctaactctgctaaaactctgacagcagtggtctgtgcaaagcctggaatgctttctaggttttctaaatcatgattaggcaaagacttcgctaacttaaccattcttgcgattaaattttctctttgatcacttaaattaagcaatctgtgtgcataatactgcacttgctcgacttctatgctagagcaagatacaactggataagcttgataagctaattcaattaatttatctgcagtccttagagcgtgtttaaaagcaatcccctttaagctcattaaccagttaataagctgttttttatcttctcttcttactaagtcacaatgaggatatcgcacaactatttgccagtaatttttacctttagcagaagaaaatagattttcaatttcaggaaaagtcgattgtagagcttggtaaagtcgatttttagccattactaagtcagctgttaactggtcatagaagcggctcaaagcattaagctgcttataagtttgagattgaagttgattaattggatgatgatatagtctttgaattaaggctaaatgataagcatcagttttatcagtcttattatgacgtagtcccatatccatttcttttttagctttaagaggattaagaattacataatcatagccatagtcttccagaaaagattgcagtgtacgtgaataaacaccggtagcttcaaaaataatttgcggatgtttagaaaaagcggttaattcatgaagcaattgaataaaaccaggacgattattagtaatggttagttcatttttgctttcaccaattagttcacaaacagtagaagtagacttgcttacatcaattccaaaagtaacttgcataataaaaacctccaaaacttagtagtaaaacgtatttacttaagaaatcagatctaattttctaaactcgacatctagtgtccacattcttcgaagagactattgaaaacttaagtaaaactgccagtttattatgcgacatcaagtgtctaaagacctcagggcatatcgttttactactactttaattctacaaaagaataaaaatagtgaatcaattatcccgtcggataactaattcactatttagcttagaatgtttactatgtctaaatttaataaagaacaaaaaatagaaatttatcataaatggaaagatgaaaatatctcaatcagtcaattggctaaagcgtacagaatgaatctagctaatttagactatatgcttagattaattgatatgcatggaatagaaattttaactactaaaaaccaaagctattccaaagagtttaagcagcgaactattgaacaagcaatctttggcaataaaccatacttacagctgcctttggaactggggtttaaaagtattggcatgcttaacaattggattagagaatataagaaaaacgggtataatgtcattatcaaacagaaaggacgccctgcccgtgaccaaagaaaagcagaaatctcgcaaggaactggagaaagagatccagcagctgaaagaagaaaacttgcgattgcgtattgtgaacgaatacgtaaaaaaactaagtgccttggatcaagaagatcagaagaaatagctagggtgattacggatctaaggcaagaattcaaagttagtttaaattatgtattagctgcgattgcagagcaccctgagctacctataattgccagaagctcatactacaagattatcaaacgacagcccgtcaagcctaaacggtcaaagcttattgctagaatccatgagatttttaatcatcatcaaggccgctatggatatcgcagagtagctttgcagttaatcagagagggctggaaagttacggagaaaaccgttcgctattggatgcataaattaggtcttaaaggcatcaggcgcaataagcgcaaatattcaagctataaaggtactattggcaaaatagctccaaatttaattcatcgtgatttcttcgcagccctgcctaacacaaaatggtatactgatatcactgaatttcatcttaataatgaaaagctttatttatcgcctattctagacggctgcggtggcgatatagtttcttatactatctccaaacatccagatatggatttagtaatgacaatgcttgacaaggcttttgccaaagaaacagctcttaataactgcatttttgatactgatcagggctgtcagtatcaaagccctcgttatcagcgagctttaaaactccatggtattactcaaagcatgtccagaaagagcaactccatggatgatgggctaatggagaacttctttggcctgctcaaaactgaaatgttctatgatcaagaatacaagtatcataatcttcaagaattaactcaagcaatcgaggaatatatcgaatactataacaacgaaaggataaagagcagattaaaaggcttaaccccgaaagagtatcgaagtcaagcctctattaatccaatattttaattgtctactttttacgtctcagtacatttttacattaattactattatttttcttcttaattagttaatttaaaaagttctggtcaaaacctgacacctttgacacttttcctctcaacaccttgatactactagctttatccatcatatctccattgacaccaaaacaattcaaaagctacccaatgcttgatataacaataatctgctagtgtcaacttaaccaacaccagaccgacaccatttgagttaataactgacacttttcaaatttcaagattcggtgtcaacaacggtgtcgcacatcgactaaaatgtgtcagctaaaccgacaccaaattttaacttggctatgtagattctcaaccattcgcactatattaaatgcaagcctgttcaaaaacttttagctttttgaatgaacgtgctgggcctacaacatcaagcttaaatgatgttcagaaacttatggtcaaaaaggatggattgaaatgacggaatatggctatgctagggtgtctacaaagggacaagaactagcagatcaaattaatcaattgcaaactgctgggatcagtgaggattgcattttctccgaaaaatttactggaactacaactgaccgaccacaatttgctaaactaactcaattggcgaaaccgggtgatgtgattacggttaccaagctggatcggttagctagaaatacccgggaagcattaaatgttattgacccactaatgaatcaaggagtgaagatcaatgtacttaacattggcatgttggaaaactcaactgtgggtaaattagttaaaacaattctcttagcagtggcggaaatggaacgggatatgattgtggaccgcacccaataagggaaacgttatgctaagttacaccggtctgattatcatgaaggacgaccccaaagagccattaccccgcactaccaagccgcttatgagtacttgcttactcattcctacaaacagactgcgagtgcttttgatatttcgatttcaactttgcaacggatccgaaagcaggtggagcaaaataatatagcttagttttaaaaaagtatatattattttgcgctggaggatttgaaaaatggtaaaatgttataccccatttatttactggattgatactaccggtctagactggcaaagcgatgaaatcattcacctaaccataacggatttatttggtaacattgtgttctcacatctgtttaaaccagtgaaaattgaaagttgggacccaactcagcagggtttccacacaaaagcacttgcccccccacatattcaatatataataaattacgcgtggtgctagttaagtcgttttagttaataaaaaagtccaatcggattagactcaagttgtaacttaaattaaatagaaaagagtctgatctaattgaactatctcaagcttaatcgtttttctcaccatttacaagttagctttgctcggctaaatgtaatttgtcgttctttgtacaagctttgtgctcctgatgagctgaaataccgtaaaaatattgatcaggttaagctcttagacagttctattttagcaatgcttatttggcaaactgaaattggtatcgaatctcaaagaagattttgtaaattctttgtcggtttgtctcattctcgctttaatcgtcgggcacgaatgcttttgcctttaatgcgctgtatccgtcaagattggaatcaagaagtaaaaacagctggagaattcttaattattgacagcttcccagttccagtttgtcagcccatccgcaactatcgcgtcaagatctttcgtggcatatctgatatcggatataaagccactaagaaaatctattattacggcttcaaggttcacgcgatagtaagtgatgacggctatgtgctttggacaccatatcgaagaaacatgaaaggcgctaaaaagcataacgatcatcaactgatggcaattagaagaacaattgagagcgacttttctttgcttagctactataacgctgaaaataactgggcaaggagcttagctggttttcagcagcggctagaaatagccattttggcttataatatagcatattgcctagaacgatttaactagcaccacgcgtaataaattgcgtcttagaaagaggatataaaatatggacaaattacataagcaacaagtagcaaaacgacaacgatttgccattaagaaattaacagttggaacggcatctgtccttgttggcttaaccttcattattagtggtaatgccaaggcagatacgacagttgctgctcaaaatacattcacgactcaagtgactgatccacaagttagtgcccattcaagcaatattcggattagcgacgaatcaaatacggttgttcatcaaacttcatcaacattagttccaaataaaacaacaacgccagcgcaacaaatgccgataatccataaaacacagcaaaacaaccactgcccagtaagtacaacaaacacagcaaaacaaccactgcccagtaagtacaacattactatgaattttcgcgatgtcaccctacataagccaattcaagtgattagtaatggtcattatgtattcaaacaacctttcaagcagaccacaattcgaccaggggatagtgtggatcaagaatttactgtggccggttataaattaatgaattcagaagttttgaataagtatttctattttgataaacaaggtaatgcctgccttaagaaaggtattactacgcaagacattaacattaatttagattacgcatcattgtcaccaatcaaagtagagtatgttgatgtagataacgggcatattttagcatcaatcgttctagatagtttctggatggcccctgaatctccacaacaccgtgctggtgataagaaagcaccggatgcatcacgctatgaagccgcagccattaatattcctggatataaattagtttctgaacctgttttaaagggtaaaatcactggtcaaactcgaaattcgttagctgatcctaactatgtttatttaactttcaagtataagaaggttataaaaaataattctgatagtaataggactgaattgttacttgttccagaagaaacaaatctaccgtacaaattctttacgattgctggtagctatggcaaaaggattgacctaaacaatggtaattatgagaaaaaaatgagtgaggagattagccattacgaaaaacaaggttactcctatataggaagtacagggacatatcttaattctgattatttcaattggtacgctaaggggatacatgtttacttgctaccaaacaaaccagtaactgtgaggtacattgatgagcaaggaaatgtgcttaggaataatgatacgcttgcgttcaacctagataatcctaaccaaaaaaataatggggttaatccgcaaaaaggctggtatgcaaatggtccatggcaagtccaacctaagaaaattaaaggttatcgtcttgttcgtactcttggagtaacgagtggccagtatactgtataccaatacaccacaacttttgtttacactaaggacacagatccaactgatcccaaaacgccagagacaacaacaacaacaacaactgatccaaagacaccaagcgataagcttccggacaatcctggcaagtctggtcagacagttccagttaatattcacattcctgatggttatcaattagttcctggtgaaagtgttccaacattttacaccttcaaggatggtaaccctaatcaaatcattagttgttggttgatcccaactaatggcggtcaaccaacaactaatgatcatcaaggacaaggaacaccagctactaatacgcctacaaacactactcctaatggaaatgctgttactggcaaactagaaggtaatgttcctaacatgcaaactgggaagacgattacgtttcaaccaacgacagctaaggataaccaactaccacaaactggtaatgacaatagcttaacaaccgttgccgggattattgtaagcctgttaaccagttgcttagctgttcttggcattaataaacatcaaggctaatatgattacctaccaaccattccgaagctaatcaagacgcgatgctttaattagcttcggaattttgaatgatatatcattataataggatggaataaactttatataaatataagtaatggggattgatttctaatcttttaagaatactgtttatggttgattttttatacaatgtttccaactgagagtaaatataaaaagggagatactatgttatcagcaaagaattattacggccgtctggtaaagttaaaaccaaaacaagatcatttttcacttcgtaagttatctattggtcttatttctgttaccataggtattaccttatacttgggagtggacaactcctatgttatggctgatacgaatttgagggataataacaatcaacaattagccggatcgggtaatggcaccaatataataaatgataaagttaaaattccaaccggtgcttttcagtctaaacaaatgcaaactgaaaattgcaaagtaaataatcagatgttggataaaactgaagtaacaaattctactaaaaattcttctacactaaatgtggaaaattccaagactgctgatttgtcgagatttgattactctttatatacaaaaaaagtaaagagttttgaatttagaaattcagataataacgatgtaattagaacagtaatattaaacaaacctaccggtgttgaaactgtaactatgactttgaatgttagctgcttaaaagggagaaagcatcagcatcgatcgcacacatctactagatcgagtatttataattataaacctcaagttattgctgaagtaaatacatccaataatccattgccaaaaatatcaattttggagaaaaacgttttaccaaaaactttttttcaagtagataagaatacatttcttactcaacaggataaagagaactatgagaaatttatatcagttaataagaatgatattagcatagaattaccagctttttccattaatgatattgatattccaggctattcttatcatattaatgcaaaaaagactactcctggagcaggattaggtaaagaaaagttttacatctacactgaatcaccacaaacagttgttatcgactataccccgattacggttaaggttgaacataagatcatcacggtaacaccaaccgatccgaagacaccaagcgataagcttccagacaatcctggcaagaactatccaaagggtgttgataagaaagatctgaacaagactgttaagcggacgattactgttaataaaccagctggctcaactgttgatgctagtcaagagactactctaactcggacggctactgttgacgaggttacaggccaagttacgtatggcaaatggacaacctcaaagcttgataagtataatgcaccagaaattccaggttacactccaagtcaagcagaagtccctgcagttgatcaggtaacggttgattacacagatccaaaaattgaaattacctacacgccaaccgaacagactgggaagatcacatacgttgatccaaacggcaaagaagttggtactaccccattaacaggaaagacggatgaagagattccagttacaccaaacgttcctgcaggttggcagattgttcctgatccaaagattccaacaaagatcaccgctactccagacggcattcaaacagttacggttaaggttgaacataagatcatcacggtaacaccaaccgatccgaagacaccaagcgataagcttccagacaatcctggcaagaactatccaaagggtgttgataagaaagatctgaacaagactgttaagcggacgattactgttaataaaccagctggctcaactgttgatgctagtcaagagactactctaactcggacggctactgttgacgaggttacaggccaagttacgtatggcaaatggacaacctcaaagcttgataagtataatgcaccagaaattccaggttacactccaagtcaagcagaagtccctgcagttgatcaggtaacggttgattacacagatccaaaaattgaaattacctacacgccaaccgaacagactgggaagatcacatacgttgatccaaacggcaaagaagttggtactaccccattaacaggaaagacggatgaagagattccagttacaccaaacgttcctgcaggttggcagattgttcctgatccaaagattccaacaaagatcaccgctactccagacggcattcaaacagttacggttaaggttgaacataagatcatcacggtaacaccaaccgatccgaagacaccaagcgataagcttccagacaatcctggcaagaactatccaaagggtgttgataagaaagatctgaacaagactgttaagcggacgattactgttaataaaccagctggctcaactgttgatgctagtcaagagactactctaactcggacggctactgttgacgaggttacaggccaagttacgtatggcaaatggacaacctcaaagcttgataagtataatgcaccagaaattccaggttacactccaagtcaagcagaagtccctgcagttgatcaggtaacggttgattacacagatccaaaaattgaaattacctacacgccaaccgaacagactgggaagatcacatacgttgatccaaacggcaaagaagttggtactaccccattaacaggaaagacggatgaagagattccagttacaccaaacgttcctgcaggttggcagattgttcctgatccaaagattccaacaaagatcaccgctactccagacggcattcaaacagttacggttaaggttgaacataagatcatcacggtaacaccaaccgatccgaagacaccaagcgataagcttccagacaatcctggcaagaactatccaaagggtgttgataagaaagatctgaacaagactgttaagcggacgattactgttaataaaccagctggctcaactgttgatgctagtcaagagactactctaactcggacggctactgttgacgaggttacaggccaagttacgtatggcaaatggacaacctcaaagcttgataagtataatgcaccagaaattccaggttacactccaagtcaagcagaagtccctgcagttgatcaggtaacggttgattacacagatccaaaaattgaaattacctacacgccaaccgaacagactgggaagatcacatacgttgatccaaacggcaaagaagttggtactaccccattaacaggaaagacggatgaagagattccagttacaccaaacgttcctgcaggttggcagattgttcctgatccaaagattccaacaaagatcaccgctactccagacggcattcaaacagttacggttaaggttgaacataagatcatcacggtaacaccaaccgatccgaagacaccaagcgataagcttccagacaatcctggcaagaactatccaaagggtgttgataagaaagatctgaacaagactgttaagcggacgattacgtctcaaccaacgacagctaaggataaccaactaccacaaactggtaatgacaatagcttaacattaatgggcttaggtgcctccaccttattgggaatgtttggccttgctgctgtaaacaagaagcgtaagtaatcaaattagctctacaattttatccctttgtcagtactgatgaggtattttgatgaggttagtttaagtagcgaagctgcttgagctgaccttttcttttagcttagtttttaccatgagatttgagagctagtagacttcggatacgggaatgatcaaagttgcgaaaaccataagctgttattctagtggtcttaattttattattgtaagcagtcgttatcaatacgggttgaacaaagggactctacaattgtaagtactgatgaatttaacatcagtgcttattttggttttctacgaatagtcaaggatattaaaggaattccttggaatttagctggatagaaaagttaattaaataattaaaatggctcaaagttaaatttaaagtataacaaaacaagctcatgaactagatttattgaacctgtcaaatcttttgtgtaaatagttctttctcgtaaattgatttttgaattatttattcaaaataagattctaaggtatcctgaacctgaccaaagcctttatgaattcggttgaaatagcggtcattgtagctcattgcctggatgccaataaatgcatcaagcgactgttcagttggaaattctgccttaggcttagctttacgcttgatgacgttgttaaaggattcaatcatattggttgaataaattgaagctctgatttgtttgggataattgtagaagaccagcagatcgggctcaatttccttcaaacctttgatgacattgctataagctttattccatctggcatagaatttgtgcaagacagctgcagcttctttttggcttgtctgttgatgtatctgcttgaattcgttcatgatcttttcgcggtcatccacccggactttagcacagatattgcgcatgacatgaaccaggcagcgttgaaaatgagctttaggataagtcctggccaaggctgttttcatgccaacaacaccatcagaaagaaagagttcaacttgcttcaagcctctggacttcatgttttgaagcatctctgtccagacttcaatgttctcactaggagcaatgcagtagtcaatgacttccttatgtccattaggtttaatgccaatggcaatatatactgcttcacgctcaaacgtttctcggcgcaaaggaaggtatgtcgcatccaaatagacacagaaaaacttgtcgcttagcttgcgcttgtgataagcctcaaccttggggagcatctgcttggaaatatttgatacttgagctggactataatgactgccatacattttctcaatcaagtcagcgatttctctggtagttacgcctttggagtagagcttgataatcgtgctttccaaaacatcagagtgctgcttgtagtcaggcagcgtgtgctgatgaaactgaccgttgcggtctcgaggcacttgcacttcaattggtccaaactgggtatcaaccttgcggaaataagcaccatttctagaattgccagtattccagccatttctggcatagggatcatagcctagaaaggcagtcaactcagcttctagcaagttattaacagcctgttgtagctctttgcgcaataaatcatttattttgtctggattgaatagagcttgagcaaaatctttggtaaaatcattcatgaaggagttcttctttctgtatgtgtttttttgttcaaaccaatcatacgagaaaggaactcctttttctaatgtttaaagaaataaatttaaggaatcattcatccttacacaaactattttacagtctctccaaagagtttaagcagcgaactattgaacaagcaatctttggcaataaaccatacttacagctgcctttggaactggggtttaaaagtattggcatgcttaacaattggattagagaatataagaaaaacgggtataatgtcattatcaaacagaaaggacgccctgcccgtgaccaaagaaaagcagaaatctcgcaaggaactggagaaagagatccagcagctgaaagaagaaaacttgcgattgcgtattgtgaacgaatacgtaaaaaaactaagtgccttggatcaagaagatcagaagaaatagctagggtgattacggatctaaggcaagaattcaaagttagtttaaattatgtattagctgcgattgcagagcaccctgagctacctataattgccagaagctcatactacaagattatcaaacgacagcccgtcaagcctaaacggtcaaagcttattgctagaatccatgagatttttaatcatcatcaaggccgctatggatatcgcagagtagctttgcagttaatcagagagggctggaaagttacggagaaaaccgttcgctattggatgcataaattaggtcttaaaggcatcaggtgcaataagcgcaaatattcaagctataaaggtactattggcaaaatagctccaaatttaattcatcgtgatttcttcgcagccctgcctaacacaaaatggtatactgatatcactgaatttcatcttaataatgaaaagctttatttatcgcctattctagacggctgcggtggcgatatagtttcttatactatctccaaacatccagatatggatttagtaatgacaatgcttgacaaggcttttgccaaagaaacagctcttaataactgcatttttgatactgatcagggctgtcagtatcaaagccctcgttatcagcgagctttaaaactccatggtattactcaaagcatgtccagaaagagcaactccatggatgatgggctaatggagaacttctttggcctgctcaaaactgaaatgttctatgatcaagaatacaagtatcataatcttcaagaattaactcaagcaatcgaggaatatatcgaatactataacaacgaaaggataaagagcagattaaaaggcttaaccccgaaagagtatcgaagtcaagcctctattaatccaatattttaattgtctactttttacgtctcagtacagtgctttcgaggcttttcttttatattattttttcttagaaatagagtcacggatatttaattgactatggcaagtgatcgtaagtggaatttgaatatcttccgtaattagatctttagccaaacgaacggcagtcttgcccatttcttcagtattcatatagacactggatagggtaggagttaagaagcgattgatatctacatcatcaaaactaacaacagagatatcgtcagggatgttaacacctgcatcactaaaggctttataaacacctaatgccataggatcactaccgacaacaacagcagtaggacgttgttgcagttttaagatctcttttccagcttcaaaagcagagttagttgaccaatcagtaataaaagaatggcagtactggtcaagattgtggagtttcatccaggacaagtaagtgagttcacgtagatcatttttttcacaagcaatcttaccgtcaagatcaagaaccaatgattttccaccgatgtaaacaatgttcttgtgtcccaggttatagagggtatcaagaatatgagaagtttcttccacaaaatcattacgaacgatattacaattatgaatattggtgttgacgtcgataaaaattatatggggattaatgctttgaatctgcttaattgctacaggtgtcatttcaccctcgattagcactgcgccaaatttagctaagtcagcccaatttttattatcatcttctattctaaaaggttgctcaatacgtaaatgccatttcttggcttcttcattaatgcctttatgcagattgagaaaatagggatcggtgatttcacgagatttgttataacgcatgattagtgcaatcgagagctggttatcagtttgcttgggaccaggatgtttttgagatttcgaataatgcaggcgtttggcggtttcgataacgcgggcacgactagcctcattgattctaaaagttggatcattgtttaaaattcgtgatacgctagctggcgataccccagcaatacgtgcaatgtctctaatacttgccataaagatgctccttgtttgtttactgtttacattatacaacttttagcaagaaactggtgtataccaaacttgaggataatagtttagtgtccataaagtaagtcatattgaatcaatgttacttactttatggacactaaatttacttattttactacactacatagtaaagtgtagtaaaataagtaaaaaagcaattgaaaaagaagaatatggaaataataaaatcttaataatttgttcgcttgtttttatatttgtaattcattaaacttatgttcgaaataatgaaaggagaaatatatttttcaattgtaggtaatataattccatattcgtatattgacagtacttatgaaacaaaaatcattgattagtcaactagcaaaaatacataacggtacaattactcatcgtgaattagcattaaatggagtatcaagttatagtatttcgaaagctgttcaggatggtacgttagaaaaaatacgtccgggaatttatttatttggtgatgataccgaggatatattttatagtttgcaacaaaaatataaaaaaggaatctattctttagaaacagcattatatttatgggggttaagtgatcaatatccttttagcttagatatgacttttcctaggggctacaataatccaactttggatattgaaataaatccacatattcaaactaaaagtttggctactcagggaataactcaaactgaatcattcaatggaaatgtgattaatctctatactcctgaaagaactctagctgaaatattgcgaccgattaatgctgtagatatcgaaataattaccaatgccttcaagatgtggaataaggaaaagaaaaaagacataaatacattaatgtcttttgcagaaaagtttagggtaactagaaaggtaaatagctacttagaggtgttgttgtgaaaaattatgttgatgagaagcagttcaaagcagatgtaagaaggtatgctagagagcataatataaaaggaaatgagattggtcgattatggcaagaaattatgttagatgatttgctagaaagaatttcagtatcaaaatatcgagataatttcattttaaaaggtggttttttgttgtcggctattgttggtatcgataaaagatccacggaagacattgatgctgagataaaaggattagatttgaccgaaaaacaaatagctaaagtatttgaagaaatctgtcaaataaaattagcgggggatctattaagcatttcgttgtcagaaattgaacagattcatgagcatgaagagtacaagggctatcgattacattttaatgcttcttttcggaagataagatatccattaaaagtagatgtttcaacaggggatgttattacacctagggagattgaatatagctataaattacatttagaagatcgacatattaatatttgggcatatactatggaaactatagtagcggaaaaattagaaacggtaattacgagaggaatagctaatacacgtatgaaagatctctatgatttattcatactgcagagagaacgaatcaatttagctactttaaagtcagcttttgctaatactacgaattaccgtgaatcaatcttttggacaggacaagatatagattataagtattgtctaagacaagtagatattattgctgaaaatagtaatatgcagaatctttggaatagatacgtgagaaaacatccttttgctaagggaatcacttttactcaagttattcaggcagttcaaacttggctaactaaattagagtttgaaaaataatttcaatcaaaaatgacgctagttgatcgaaccagcgtcatttttttagataatagatgtagaaaatagtttgaaaaacgattagtttttatagaaatctttattatactttacttgtcttcgtagccctttgggtgactcttgtgccagttccaagcagttgcgataacgtcatcaacactttcatgctttggcttccagcccaaaatagttcttgctttggttgaatcagcaaccaaagagtcagggtcaccgccacgacgtggacccattgtgtaaggaatatcaatccctgttacttttttagcagcgttcaaaatttcaaggttggagtaaccttgagcagtacccaagttaaagacatctgacttattagtctccatcatatgtttcagtgccaaaatatgagcatcaattaaatcttcaacttgaacgtagtcacgaacgttggtaccgtccttagtgtcatagtcatcaccaaagatagtaaacttaccatccccagaaattgcactcttcaaaatatttggaatcaagtgtgtttctggtgcgtgatcttcaccgattgtgccatcacttgcagcaccagcaacgttgaagtagcgaagagcagtgtacttaataccatcagctttatcagcccaagccatgatcttttccatcatcatcttggtttcaccatatgggttgattggatcaagtggggtgtcttcggtgattggcaatttcttaggaataccataagttgcagcacttgaagagaagactaagtatttaacaccagcgtcattcatagcttgtaataatgaaatcatgccagtaacgttattgtcatagtacttaagtggctttttaactgactctggaactaatgaatatgctgcaaagtgcattacagcatcaatcttttcatcacgtaaaattttgcttaccaaaaaagtatcttcaatatcgccttggtaaaacttagccttaggatctacagcctttctgtgaccagtatataaagcatctaagacaacaacatcattgccttctttaactaattcgcgtacagcgtgtgagccgatataacccgcaccaccgacaactaaaactttcatgttttgcgctcctttattttagttattatcttttattgaaatcgattacattataacacatattttagtaaataatttacttattttagataaattatttaaaaacactaatttagtctaaatgaaaattcatgatcttgacttgggtcgatttgatattgatcttcaacatctgtaccccagctatcgatgccacctacaccgcgaacggcacctgcgattactaaaactgttctccgggcaagaggcaattcttcaatatgcgttgcattttctagttcttctgctgtgtagggaaggcaactgaagttgaatggcttatcagtttgctcaacggtgaggtcaaaatcctcattagaatgatcagcattgttgagcgtagtatttctagtgattttgagtttatgcgtttgcatgtgcatcccattttcctgtggcactaggtatttggttactggcaatcccttaattttaaaagagccagcactggctccagccatccgatcaggataagtctcaccagataagccttcatattcaaagccactagctagagttggtatgataaagcgcattccaattactggaagcggtggtaaatcttttttaccaaaataacgcatcttaattgtaacatgaccattattgttaatttggtaagtaatttcaacttttgtttttggaatagttaaagtttcataaataaaagtaatttcgactttacttgcgtactcatgattagaaaattggttgttgagcggagcgattggcaaatctgcaaaatcatgttgatcaactttgagctgaatttcagtacagtggctaaacatatcggcgccgagccattgagctgcttttaagttgaaaccgttgccgcgatcgttatcagtagttgcacgccaaaaggttggggtaggaacgcgataaaaccattctttacccttaatttttaaagactctaagccacctttttcatagctgaaaatatattgcttatctggggtattaatgcctaaagtagcatccccatagattatatgtaaattatttgtgtaagccatagtagtatttaacctcctgcattgctggttttggtgtacgatcggcgaacattaagccatcgcctgaaaattcataatcagagtgtcggtcgtcaaagtcgccgccataccgtaatacttcttggccactcaccggatcgtgtactaatagcgcttggtcgatgaagtcccaaataaagccgcctaaatattgtgggtattggtcaagcaatttaatgtaggaacccatgccaccatcagaattacccatatcatgcatatattcgcattctaaaaatggcttttgaggcttatttttaagatattcttcaacatcttttggtggtaaatacatccagctttcaagatcagaaatcttgtcctttaattctggcgtatgaaccacgccttcatagtgggtcaggcgactatgatcgtgtgctttataaaatttattcatagccgcaatgttttctccggcatatgattcattgccaagagaccagaagagaatggcggtatggttttttaaagtttcataattgttgcgggcacggtcaattacagcttcacgccattcaggaatagaaccgggaacattatctgaaggttcaacttgtcccatcttttgccaagtaccatgtgattcgagattattttcagccatgacatagattccattttgatcgcagagatagtaccacggaatctgattaggataatggcaagttctaaccgcattgatgttattttctttaaaagcatgtatatcttgtttcatatcagttaaagtgatgctgcggccacgcttcatattccattcatgccgattgaccccattaataattagacgttgaccatttaataaaacaaccttgtcagaattaatttcgatttttctaaagccgaattggtaaggaattagttcaagtaaatcaccattttcagcgtgaacttcaataattagttggtacaaatatgggtcatggttatcccaaagatgcacatttttgaataattctttttcaatttttatggttaagctgattggtgcttttttctcaagtagagttttgccattaatatcttctacgaacaagtgaactgagccagtatttttgcctgtaaagtgcaattgagcattaaagattccatcttggtaattatttgtaacttctggttttaaatcgagatcggttaaatgcgtctcaggtaggccgagcaattcaactgaacgaaaaatgccagaaaaacggaacatatcctggtcttccaagaaagaggcagtgctatgtttgaaaacttcaactgctaaaatattgtttttgtttttaatgtaaggtgttagatcaaattctgaaggagtgaaactatcttcggcgtaaccaacaaaatgaccattgagccaaacatacattgctcgctcaactccttcaaaaacaatgtgaacatcacgacctcgcaaagtggaatttaagtcaaaatgcttaatgtaagagccaactgtgttatctgcacctttgctaaaagagtcggtagctttttggttgattgtgtaagcaggtcgacgataaatttttccttcccacggaaagagcgtattaatatattgattttgagcgtaattatttagctcaatttcacttgggactggaatgtgatcaaatgatgaagaatcgaaatctgttttaaagaaatcaacgggtcgtgtttgtggattagctgaaaacttaaaacaccagtcaccatttaaactttgaacaaaactactagtttgcttttgccattcgcgatagttcttgaaatagggatgatcgctgtgggcaggaacttgattaacgcggaaaacttcggggtcatcaagccagctaagatttgctttcatgaaaatacctgatttctataaaaaaattaaccttgaaaacgcttatattataacacatagataataaatttacttaataagtaaattatttactgaaaaatattttgaagattaatatttttgactcgaaaacgaatgacaaagtgcttatgatatttattggaattacgtaaatattttgtataataaagttaaaaattatttatttaagatagaaaagatataaatatgacaacaattaaagaaatagcacaagaatcagggtattcttcagctacggtttcgcgcttattaaataatgatcctaatttgtcaattacggctgatactaagaacaagattttagaaattgccaataaattgggctattggaaggatcatcaggaaaagaagatccgtccaacaattgcgttactataccgagtaaatcatgaagagcaactgcaagatgaatattttacttcattaaagcaagcgctgatttcaacagtagaagcagagtcgctgcagatgaagactttttatgatgcagatgatttgattaaacatgcatcactttttcagggctttatcggagttggcgcggcgccaattgaaaatgcaacactaaaaaaactccatgaggttttgcctaatggggtctttgtcgatactaatccagccccggaattatttgattccattcgcccaaatttaacgctgacagtaaaaaatgcaattgatctttttcttgataaaggatatcagcgcattggttttataggtggcattgggcctaagcatgatcatattcaagaagtagatgtacgtgccaccgcttttgcggagtatatcaaggtgagaggcaaaagtgatgaattgatgtttgttaatggcccgtttagcgttgctaatggctataagttgggaaaagaggtactggctaaatgcaaaaataaattgcctgatgcatttttaattgcttcggatactttggcagttggagttttgcaagcttttaatgagaacaatgttaatgtgccaaaagatactgcaattttaagtattaataatagtaatgtggttaagtatgtttcaccgccactttcttcttataatattgatcaacaagagatgattgatatggcattaaatatgctaacgaatctgattattcaacctaatcgggcacacattgatgtaaatatgaatactaatttagttgtgcgcaagagttttgtgcctaagaagtaaattaattagtaaataaaaatattttttagtaatactatcaaaagagaatgctaatttaatgcgttctctttttgtttagctttcagtaaagaatttattaaatataaataaattctttacttaacaaaaatagagaatatactaaactgtgtaaacgattacaattaatgattgctttagggggcaaatttatgacacacagtgacaagtcagggaagcagattctttcctacgcatcattctgtttgggtaacttaggtcactcggctttttatggtgtgatgagtacatattttattatttttattactagcagcatgttcagcggacttaatcagtccgttgcagataagctgatcggcttaattacaggattgatggttgtaattagaattgctgaattggtaattgatcctattctaggaaatatagttgataatactaaaactagatggggcaaattcaaaccttggattttaattggtactttagtaagtgccgccttattattagttttgtttactggcatttttggattagcacaaaaaagttggattctctttgcgattttatttgtactaatttatatcagttttgatgtattttattcattatctgatgtttcttattggggcatggtaccagctttaagtgaagattcacatgcacgtggtatttatacttctttaggtgccttttcaggaacaattggttggaacggattaacaattattgttgttccattagttacagctgtgacttatgcggtaactggtaaacatgaggaaggtgcaccaggttggttagcatttgcggcagtaatttcagctttggcaattgtatgtgccttgattgtttgtttcggtactaaagaaaagcataatattattagaaactcagctaagcaaaagactagcttaggtcaagtgtttggagcaatttttcataatgaccaaattttatggccaagtttagcatacttgctttactcattagcatatgtaattaccaatggtgttttgttctatatgtataaattcgttattggtaagccaaatgacttctgggtagttggtgttattgcaacaattatcggtttctgtattagtccaatgttcccaattctgaacaaatacattccaagaaaatggttattcatcgctggacaaacttgcatggttttagcttatgttttgtttattttcggcagagacaacgtatttttgatggacttgggcttggttcttttaaacattaactttgctcaattggtaactgttttaacattaactgacgcaattgaatatggacaacttaagaatggtcaaagaaatgaagctgttgttttagctgttcggccgatgattgataagtttaccggtgcggtttctaatgctttagttggttatattgcaattgctgctgggatgaccggttctgcaactgctgcagacatgactgctcatgatattagcacctttaatatggtggcattatatatcccacttgctttggcagtcttatcaatcgtagtctttttgactaaggtaactttatctgaaaagaaacatgccgaagtggttgaagaattaaaagatcaacttgcagaaggtaagattgaaaagaatgaatctaatactcaagttagacctcaagatcagactatctatgctcctgcagacggtaagttaatgaagatggcagaagtaattgacgaagatggtaagccattcccaggaaagggttttgcaattaaaccagattcaggcaatatttatgctccatttgatggtgtagttaggttcacttttggtactaagcatgcttttgaaattgtttcaaataatggtttacaagtagttgttcatgtcggcttaggtacagttaacttgcgcggtgaaggttttgaaacttattatgatgatggtcaaaaggtaaaaaaaggtgacttgctgttagagtttgatcgtaatttagctcttaagaatggctatcaggacactgtagttaccttctatacacaaccaggacgaattgtaaaatctagtgaaattgaagctggtaagattgttgagcatggtgaaaaagtattagatgtacaatttaagtagaggaattacaatgacacagttaaaacgttttttatatggtggggactataacccagatcaatggccagaagacacttggtcagaagatattaaagtttttaaaaaagcggatttaaattctgctacaattaatgttttttcttggagtttgcttgagtcaagagaaggccaatatgatttttcaaaattagatagaattattcaagaattgtctgatgcaaattttgatattgtacttgctacttctactgctgcgatgccagcttggatgtttaaaaaataccctgacgtagcgcgagttgattatcaaggacggcggcatgtctttggcgcacgacataacttttgccccaatagtaagaattatcaagttttagctagtaaattagtcgagaaaattgccgaaagatatagtaataaacctcatattgctgtttggcatgtgaataatgaatatggcggcaattgctactgtgaaaattgtcaaaatgcttttcgtacttggctcaagagtaaatatcaaacactagataacctgaatgaggcctggaatatgaatgtgtggagccatactattcatgattgggatcagattgttgttcctaatgagttaggagacgcctggggaccagaaggtagcgaaaccattgttgccggtttatcaattgattatttacgttttcaatctgatagtttacaaaatctttttcagatggaaaaatcaattattaaaaagtatgatactaacactcctgtaactactaatttccatggtttaccaaataagatggttgattatcaaaaatgggctaaagatcaagatattatttcttatgattcttacccaacctacgatgcacctaagtatttaccagcatttttgtatgacttaatgcgtagtttaaagcatcagccatttatgttgatggaatctgcaccgtctcaagtcaattggcaaccatatagcccgctgaaaagaccagggcagatggcagccacggaattgcaagcagttgctcatggtgcagatacggttcagtttttccaattaaaacaagcagtaggcggctcagaaaagttccatagtgccgtaattgcccactcacaaagaaccgacacgagggtctttcatgaactagaagatttgggtaaaaaattaaaaaagattggcccaactgttttaggctctaaaactaaggctagagctgctattgtatttgattgggataacttctggtcatatgagtacgttgacggtattagtcaagattttaattatatggaatcaatcttagattattatcgccaattttatgaacgcaatattccgacagatgtaattagtgtcgatgatgattttagtcaatatgatttagtagttgctcctgttttatatatggttaaagcagggctaagcaaaaaaattaatgcttatgtcaaaaatggtggcaactttgtcactacctatatgtctggaatggttaacaatagtgataatgtctatcttggtggctatcctggcccgttaaaagacgttatgggtatttgggttgaagaaagtgatgcaattgtaccaggacataagacaattgtttcactaaatggcaaggattataaagcgggtttggtttgtgacttgattcatccagaaaatgcaaaagttttagcaaagtactccaatgagttttatgcaggaacggctgcagtcacggaaaataaatatggtcaaggtaaggcctggtatgttggtactaagttggatcacattgggttgacgcagctattcaaccatattgttttgacagctaacgttgaatcattggtgggcgacagtcataagttagaagttactaagcgagttactcagtctgggcaagaattatactttgttttaaatatgagtaatgaagaaagaaaattgccacaaaaatttgtagagtatcaaaatattttaactggtcagcaagctcatgatcaaatgaaggcatgggatgtacaaatacttgttaaataaatgattttttccttaatgaagacaagaagttagacaaacgatctagcttcttgttttttacttaaataaatattttatttatttaagtaaactatttactaaaagatactgaagagatatactaataactgaaaacgattacagaataaatttgaggtaaaaacaatgaataaggaagaattacttaaagaatatgagacaacttttggtgaaaaaggtaaggatgtctttttctcacctggtcgaatcaacgtgatcggtgaacacactgactacaatggtggtcatgttttcccagctgcaattagtttgggtgtttatggtgtttacggcccaagagaggataaaaaagtttgcttgttttctggcaatgttgatggcgatatcgtggaattcgatattgacgacacaactgttgagaaagatgatcgcttttgggctaactacttcaagggcatgattacgtacttacgtgaaaaatatgacaacattgatcatggttttaatctttatatcaaagccaatttaccatcaggttcagggctatcatcaagtgctgccattgaaatgctaatgggcatcattttaaaggatgaatttaacttagatgttgaccggattgctttagccaagatgggtcaaagaacagagaatgaatttgttggcttgaattcagggattatggatcaatttgcctgcattatgggtaaaaaagatagtgctatcttcctcgattgcaatacattagattatgagtataagccactcgctttaggcgattacgaaattattattatggcaactaacaagccacataccttagccgattctgcttataatgatcgtgttcgtgaatgtcatgatgcagtgaagaagttgcaggctaagttagatattaagactttaggtgagcttgataatgatacttttgatgaatatgcatatctgattaataatgaaactgaaattaagcgtgctcgtcatgctgttagtgaaaaccaaagaactttgcgggcaacaaaggccatgcaagatggagatttggaaaaattgggacgtttgattgatgcttcacacgtttcacttcattacgattatgaagtaactggtcaagaactagatactttagctgaagcttcatgggctcaacctggcgtcttgggtgcaagaatgattggcggtggcttcggtggtagtgccattgcaatcgtcaagaaagaccaagctgaggcatttaagaaaaatgttggcaagatttaccgcgacaagatcggttacgatgccagcttctatgatgcggaaattgttgatggaactaagagaatttaatcagacaagaggataagtatgaaagttattgaaaaatttgcggatgaagttattaatagtggagcgtatgagccgctcgatcgcgtatatgtgattaacaaaattcgcgctttagttggcgatgaggcaagtagcgttgaagctaatgatgaacaaacttcagttaagcaattagttgatttagccgtgcaaaataaaaagatttcggatgatgttacttcacgtgaagttttgaatgatcaactatacgacttgataacgccaacaccatctaaaactaatggcatcttttggcaaaaaatgcaaaaatcacctgaaaaagcaacagattggttttataaactttgcgaaaacaacaattatgtcaaaaaggaagcaattgccaagaatgttgtattctcagggaccagctctaaaggacatggcttagaaattacaattaatttgtccaaaccggaaaaggatcctaaggcaattgcggcagcagctcatgcaactggtaagaaatatcctcaatgtgcactttgcctagaaaacgagggttaccttggtggatatggcaaaaatgctcgttcaaatttgagaattattcgcatgaatattggtggccgcccttggggatttcagtattcaccatatgcttacttcaatgaacattgtattttcttagatcaaaagcatattccaatggtcatcaaccaacaaactttgattaatttggttgaaattgaaaagacgttaccacattattttgttggttcaaatgctgacttgccaattgttggtgggtcaatgttagcacatgaacactatcaaggcggacgtcatacttttccaatgatgaaagctaagattaagaaaaatgtagtctttgatgattatcctgaagtggttgctggcattgttgattggccaatgagcgacttgcgcttgattagcgataattcgttagatttgattgaattgggcgctaaaattattaatttctgggatcattattcagattctgctcgtcaaattaaggcttttgatggtaaaacacgtcatcatactgtgactccaattatgcaccgtgaaggcaagaacttcgtacttgatctagttttgcgtgacaacaacactagtgaaaattatccgttaggtattttccacccacataaagaattgtggcatattaaaaaggaaaatattggcttgatcgaagtaatgggccgtgctattttgccaggtcggttaaagagtgaacttgaagaagttaaaaaatactggttgggccaagataataagatggctattagccacaaagaatgggccgatcaaattaaagcagagcagaatattactgccgagaatgttgacgctgtgatgcagcaagctttagttgaagtctttgaacaagtattgcaagatgctggtgttttcaagaataatgcagatggcgatgaaggctgggataagttcattaccgctttaactaagcagatttaactcatcaatgtttaaaacgagatctgtttgatctcgtttttttgttagcggtaactcatatattctgatggttaaataatttataatatttatgaaagcgaatacaaaagaagggcaagagtatgaagacaagttttagaaaatatggcagaaaagataataaagatctttgtgaaatcacactagagaatgatcacggtatggtagttaaggtattgaactatggtgctacattggaaaaggtgttgcttgatggtgagaatatgattttgtcactggataagccagaagattacgacaaggagcgtaattatctaggcggtacggttggacgtattgccggaagagtgagacgaggtttatggcggcacggcttagaattacatcaattaccaatcaatgaagggcctaaccacattcatggtggtattgggactgatactgaaatttggaattttagacctagttgtaatgaaaaaggtgctcgtgttgatttaacactttttgatccagatgggcataatgcttatcctggtaatttaaaattacacgctcgttatgagttagataataacaatattctgcattattcattgggtgccatgagtgataagctgactatttttaatccggttaaccatactttcttcacattaggtgaaaagaaaatgattaatgacttgcaactgcaaatgaatgctgattattatattccagttgatgagactggcttgcctgatcgtggtatggaaaaagctgatggaacagcattcgattttagaaagaagaagcgagttggggatgcattggaagctgatgatccgcaaattaagaaccgcgatggaatggatcatccatttatcttggatggcaatatgccaaatgcagtgctaacttctgctaaacacaagttaacggtaacgactaatgcgccatctctgattctgtacactggtaatggctttgaccacactggcaagtatacagctgactttggtccgtattgcgggattacttttgaagcacaagtgccgccagcagaaggtgatgatttgggacgcatcacgcttttgccaggtgaaaaatttaagcggactgttgattggaaatttgaataaaaatatggagaacatccttactgaatgaattggtagggatgtttccttctttggatattatgatttgattttacaagtaaatccatattaatatttaaaatatttagaaatcaactgaaaggtatagtaaaaatgatgacaaacgaaaagattattgctttagtcaaggaagaatatctaaacaagattccaaaaatttttcgcaagcatgctgttgaaggcacttgcaagttaatcgctagagaacatcccgatttatacaaggcttttgaagatggtgaaccaaccgcagaagaaaaacaacaaatgacagagttgattaacgggattttcgaacagagaatgaaaaagcataagatgttataaaaagacgctggaatgtatgattattagatcgctacattctagcgtttttttgattttaattttgatttattaaactaacaggtagcgtataaacactttctaatgaaacagagggatcattaatttgacgtaaaagtaaatcgcacattaattcagcaatttcttttgtatgttgccgagcactaattaaatttggaaaaagactttgaatcaaatgactaccatcaaatcctgtgattaaaggtacttttcctaaataatcagcacattctttagctagtaaagctgtaatgtcatcggtacaacaaattgcatcatatttgtcatcctttaaaaattgaaggatggctatttttttagcaataattgagtcactggcactgagtgagcgaagatcgaatttagaatcaaaagtgttaaatacgcgaatcattcctttgattcgatcacttattgggtaatagtcttctttagcaccagcaataataataattttctttttcttttgttttagaacagattgtgcgatttgcatacctgcgtcatagttattagattgaacagttggtatttgaggactaattttacggtcaaagctaacaataggaaactttatttttagtccttttttaggaatcttaataggagagctggtgatcagtccagcgatttccttttgtttaaatcgctctaaatagtaattaatatcttgggattgatagtgatctagatgaagaatacaatcgtatcctttttcctgtaaataaaaggctagatattcaaataattcagaataaaaaggatcccggatttaaaattgaagtgcaacactaattgttaaacaaaaaggccatgaagacctaaacttgaagtgaccaaaaatcaagaaaggaagatcttcatgaccaactcaaattctagcatttccaagcattatcatcaattgaacagcgaacaacgtggacaaattcaagctctgcttgattctggcataacctcctgcactgctatcgctcaagaagtaggctgtcataaatcaactatcagccgtgaaattagacgaggcagtgtcctgcaaagagacagcagctatgtcttgtatgagcactattacgctgatactgcacaaatttatcatgaaaagcgccgcagaaactgctataagtgtaatccactgcaacactatgccgtctttttcagaatgctaagcagacgctttaaagccaaatttgatgccaccagcattgatgaattcgttggtgaatttcacaggattatgccaaattatccatgtcctagcacgcccactgtctatcgttatattgatcaaggattgctggatataagcaatatcgacctgccaatgaagcttaaaagacgccgaaacaaacgccatcatagtcatggtggccatgctccgcataaaaagaatcttggcaattcgattgaacagcggcctaaagaagttgaaaacagaaaagtttccctgcactgggaaggcgatttggttaaaggcgtcagacgtaaaaatcaacctgccttaatgacactgactgaaagaaccactcgttttgaggttgttatcaaaattcctgactatcgggccagtacttgtcaaagactgcttcaaaaggagattgacagacatcctaattggtttaaatcaattacgtttgacaatggttctgagtttgcggatatgaccaaaatcaaaggatgtcagatctactttgctcatccatattctccttgggaaagaggcacaaatgagaactgcaatggacttctgcgtcaattcttccctaagggcaaaagcatgaaagataagtcagctgcttatgttcaacaggcaactgatgccattaaccgcaaacatcgtcgaatcctccaatatcacacagcagaagaactcttcaagcaatacgttccttcatagcctaactgttgcacttaatttgacaattcaggattattttttattaaatcaaaataaggaattatcaacggaagaattgcttaatcatgtttggaaaaatgatcttgatgccaatagcgaggtagtctggatctatgtttcatacttgcggcaaaaattgcaatcaattcaaagctcagttcgaattgaaggcgataaaggtggttcatataagctagttaagtaggtgagcagatgattcaaaaatttcggtggaagtttattggtacttctgttgctgccttgtttgtagttttgttgttgacgttaggcggcttagtttgggtgactcatgttcaaagccaaaatgaagtcgatcgcgtgctaacggctttggtcaaaaatgaagggcgcttgtcaccaaaaaatgccaaaccagcctttggcgatcaacatgatccaattaatcgcaattttttaggtgggcagtataatcccgaagcggtttatcagtatcgctattttgcggtaacaattgatgaaagccatcaggtacatgtaattaatgataataacgtttataaaattaataattccaagatacagactattaccagatcagctttagaaaatggtgataaaagtggtgtagttgccttaggacaaaatcaatatgcctttagggttgtaaaaaattctactggtgaaatgatgattgtttttttgaatgaaactctgatttttaaccgtttttggttattatttagagtagcgttagttttaggcttaggcgctttgattgtctttgctttagttttgattttagtttcgggcaaggcaattaagccaacgattgatgcttatcacaagcagcaggaatttattaccaatgccggtcatgaattaaaaacgccactagcagttatttccgcgaatacggaaatggaagaaatgctgggcaataattctgaatggaatgaaagcaataaagagcaggtggctaaactaactaagttaatcaatcggttgatttcgctggctcgagctggcgagacgggtgagcttaccttaagcaaagttagcttttcagaaatcgttgaagaaacgactaaagattttaaatcagtcatgaagaagaatgacttagtctaccaagtatcggtgcgggaaggcttaaatgttttagctgaaaagcatactttagccgaagtagttaatattttgctagataatgcgcaaaaatattgtgatcctcatggcaagattcaggtgaaactgactaagggcggaactttaagcaaatatgcggtcttgcgggtagaaaatacctatcgtgaaggtaaaggcaaagattacagccatttctttgatcgtttttatcgcgatgatgagtcgcataattctaagaaaggtggctttgggattggcctggctatggcgcaagagttagtcgaagcctttcatggcaaaattttagcccaccacaaaggtgaagacattgtttttactgttagtttaaaaattgctaaatgatcattctgtgatagttgtataattagaacagaattgggggatcattttggcgaagagaaaatcaatttataccaaagatgttgtcctggttatggcagcatctttcttttttatgtttagtacaatgtttgttaatcctttgattaatggatatgctaaagaattaggcgctagcagtgcttttgctggaatcattgtcgggattatgagtttagcagcaatgtttttgcgaccggtagctggcaatttaaccgataaattttctaaataccgcttatcgtttattggcggcgctttaatttttgtaggagtaatgggctacgttttgactccgtcaagtggttggcttttgctctttaggttaattaacggcaccggttatgtcctgtgcacagtttgtatgactacctggcttgcttttttagtgccgcgccaacacgttggtgaagcaatgggcttttatggcttaatgaatgctttggcaatggcgttagcaccagcagtttcaattaatatttatcaaaaaataggttatcgcacaagcttgctagcatcagctgtttctgctttattaatgattgtggccattcagtttgtgggtgatcatgctttgcctaaaaagcgagttcgaacgcagaagaagagtttcaaaattatccagtttaatgttttaccggtagcaattttgacaactttatttgctatcccgtattttgtaacacaggcagatattgtaacttatgtagaacaaaaacatctgactgtcgcagttgggtcatatttcttgatctatgcggttgttttgttgattattagagtaggactaaaaaggtattttgatacagtacgttttggcgtctggttttggctaagtctagtttcaacggctgcttatattatcttgctcgcaataatgaataatgattggcaaatggctttagcggcagctttaatggcatcaggctatgggatcatttattcagttttgcaatcaactgcgctgttgttagcaccgattgaagaacaaggcttagctagtgctaccttttatttgggactagacattgcgatggcctttggcccaatgatcagtggtgtaattgattctgctttaccgatagaatggttctatccagtagaattagtcttagttccattgattttagtagtttatttcatttggcgtaagcgtttgaatggcgcaattgaccatcattagagggaaaatatgagcgaatatgtagttaaatctaagttagaagataaagaatggcaaattgccaaccaagtacgtgatcatgtttttgtttgtgatgatgttaaacatgatgcaggtcccaacccagttgagtatctatgtagtagtgttaattcatgtattgtaatgtcggcagggatgattactaaagcacatcaacttgatgttaaaaattttagggtagaaaaccaggcaaaaacggagaatctcggtcatggtaaatcagtagtaactgagatgaagatcaaggtcttctttgattcggcaatgactagagccgagaaggaagaatttttagctcatactttgcatgtttcaactgtttatcaaactattaaagcagctgtcaaaatttatgtggaattaggaaaataagcgatgagcgagccatattacaaacaagaataccagggtgaaagaaagttagatggtgaggccccagtttttagttttgatcaaattatgaaagaaacttttctgcgaccatttatctggaatgcaagaactaccagaagaagtttctggattggaatcgttattactgaagttataatttggattggtggaattattacatttttggcaactgttatgccagtttctcactatgagaatgattcagctgatatgataaatggttttgcttttaatggtgatcacgcttcgatgattgtcattatcggtatgattatttggggcttgatctatctttatttgaaattatgccaattaggcctagccgtaagaagattgcatgatatcaattatacaggttggtggattctgttaatgctgataccgttaggttggatttttgttctgtattttgcaattcagccaagtaaacaagagccggtgaaatggggaacgtatctttaccttgacgaataataaaaaatgttataatttaactataagagattacgttaggagattatatcgatgaaaactaagaatttatttacttcattagctgccgcagtgatgctttcagctggtttagctggtgcaggtgtgtctgctgcagaaccagttcatgcagcaactacacaaacttcaagcaaaaaaggtaccattagtattaagcgtagatcagtatcagctacagttaataatgctaatcctaagctttacgctgtaaaccaagatggtaaaatcgtaaagtcaatggattcaaattatactaaaggtcaaaccatccagctttacttttctaacgaggctaagaacgatcaaggttctgttactttctattatgttgacagtcaaactgtagatggacaacaatgtgcaatttatgttgtttcgactgatgttaccccttcagcaacagttccaagtcaagcagactggtcaaagcaagcacaaagtgacaaaaaagccattcaagatgcttacaacaatagagcattaaagtacatcgttgtttcacctaagtcaaaaaagggtgcaaagatctactacgcatataagaagagtgctaaggctaaaaaggtttactttaaggcaaccaagaagaagatcaagtacggtaagaagtacaagtcatcgatgatcgttaaaaacggtaagagcagatatgcttatattggtaagaagagatacttaaagacctctactattaaagtagtaagtgttaagtacgcaccagttcaattatcagatgatttgaagaacttaattgttcaaaactagaaaaagttaataaaaattgtagcgtaaaggatgaattattgtcctttacgcttttttgatctaaaaattaataataataatattgataaaaaaactcactgacctacaatagactttgcgttatttttagggagttgtaaaaataagaatgaagatagtaaaagtctatttaggattagcttgtttgatgacgttattatgtttgaagccgcaaatggtttgggcgcgagaactaaatccatttcagactaagatgattaatccgcatacgtcttatagaatttatcaaaacttaactcgtaaaggtccgtcaagaagtctatgccttgctaatacgtttaaacatggcaatgttcaagccagtgcagttagaaaagttcgcggcaataagtattgctatgtttggttagacggacatagaggcggttgggtcaatcagcgagcttttttaagaagaaaaattgcagttgtacatcagattagtttagtgaagaattcgcattatagttttccaactagggatgcgattaattatgcaacagatgcagcaggaacgataattgagccaagtaaagttaaagtatctcgagcagaagtttcatcaagtaaaaaggaaagctatcgggtaagttattcttatggtaaagctcatgctcagacagttgttcaagtgagagctaatgctagagagggcattgttaaagcaaccaaaaaaccacaagctggagacagtgctcgtagctggttcaagcactataagacgtctggtaattggggcagaagttttgcgccggaaactaaatcgcatgttttaaaaagtgttcattttaaactgaaaacctatttctatcaacctgcgactttatgtcaaagtgattcggtaactgggacggtgggactagtaccagaaggattgaccgtgtcaaatggttcaatgtatgccacaatgtatcattcacctaatgatacgcgtgctcacattgtttcttacaaatttaatcaagtgcctaatcgctatactatgcaaaagttgccatggctaccttggtcacaatttctgcggcttgcatcccatgttaagataagcccatatattaaattgggacatggacaagcaatcggttcaactcgaaagtatatttatgtgattgctaataaccatttattgcgcaagagctctcaatcagaagaaattatgcagattagtaaaaacaatttgcaaattaaacagatttggacttttaaagtttggaatcattcagctagaacaggtcgttatttccataatgctacttttgtaaatgatcaccaatttattgccgtttaccatgatgccacagaccaccgttttgaatattgggaagttactcgtcagggtaatagttggtatcctaaagagattggcgctactagaggagattttatgcgcaatgattctcccgttcaaggaattacctatgacaagcataaaaaacagatttatttggcctttaatgattatttgtttaaattgaaacgctcaggtaaagtgctggctagaggtcactttcatacagggcgtgaatttgaggggattagcataaatggtcgtcatttatacgcagagctggcgcaaaggccagaattgttgaggcagaggataagataataggtgtaaaaatatgttatacccagataaattctatttaacacaagatttaaatagaagatttgccagaactaaccttgctcgactaatatttagtgatttgcattttgagaaaacaaatatttctttaattcaaacacaattagttgctgatgggttaaatatagagagggcttccgagaaagataaggaaagaattattcgattaaaacgagcatggcaatatattattaatgaaaataaggtgttatctttagatattgaactaaagatacatttattactgacaggctatggcttccgagataatctaaactacaaacaagaagaaaaatttttcgatgagttaatgaacaacgatacctcgactacagataaggcaatgacattgatgtatcataatatgcgtaatcaattattctggggcggaaataagcgtactgccacactagctgcaaataaattaatgattgaccatggagcaggtttaattaatgccccacttgataagtgggatagatggaacaagctgattagtcaatattatttaaccggcaaaatgaatatgttaaaagattggacctatgaaaatggcattcaaggagtagtgctgaataataattcagatttacctaaacctgatattaatccagaagattatgattaattacttaagcagaccgaataggcctgctttttttgtgtgcaaaagctctttttgaaaatatcatgataaaagttcataatagaaattgtttgtttatgttaaaggagttgttttattttttatgaagaataatgatcacgttaagataagtcctagtagtcttgtcttgatgattttttcttctatttttggatttagtaattcactgacagctttttatcaaatgggttattcaagtatcatttggtatattgtcacagctattttattcttcctgccatcagccttaattttcgctgaatatggtgcttcctttaaaggaattaaaggtggaatcttttcatggcttgaaggatctactaatgaaaaagtatcatttatcggaacttttatttggctggcagcttgggtaatttggttagtttcatcaacccaatttttcttagtttcagtttcaacggcaatttttggtcatgatactaccccaagctggcatttagggtcgctgacttcaactcagttattaggtgtgttggaagttattttcttagtaattgttacattttgtgccgcaaagggaattgataaaataaaggcgattaataatattggtgggatctttactttaggaattgccattggttttacagcagtttcactttttgtctttattttgaatcatgggcaattagctgaaccagtgaccgcacaaaatatggttcattcacctaatccagcatttcagtcaccgattgcggttatttcatttattgtctatgctttatttgcctatggtggtctggaaacaacctcaggagtaattgattcagttgataaaccggaaaagaattatcctaaggctctgattacggccatggtcttaatgacagcactttatgttgtaaacatctttatgtgtggggtggctgttaattggaacaaatcgttaggtggtaaaggtgttgacttagctaatgtcgaatatgttttgattaataatttaggtattgtcactggtcatagcctaggtctatcacattctacttcactggcaattggaactgtcttttctcgtttggccggaattgcggatgtgttatcaggaattgccgctgcctttttgatggtttattcaccgattaaatcatttattgaggggtgtgatccgcgactattgcctaagaaaatggttaagttaaataagcacaatatgcctgaattctcgatgtgggtacaagcaattgtggttagcgttattatcttatttatttcatttggtggtaatggagcacaacaattctatacaattttaatggatatgatgaatgtttcttcatcagccccatatttatttttaattgctgcttacccattttttaaagctaaaaaagacttagatcggccatttgtttttattgaaggtaagaaaaaagtttgggcaacgacaattgttgtttggttagtggttgcggtcggaattatctttacttgtatagaaccactctttaccggagactggcaaacttcattctggacggctattggtccagtggcctttggtgttattgcttggatttattacgcatataatgaacgaaaagaaaaagcaatggcttaatacgcaaaataagacgaaggattttgtccttcgtcttatttcttttctctattttttactttaagccagctactctgacaacatcacgttcaatcattaattcctcattagttggaataaccataccaacaatagttgagtcgggcttggtaataatggtggcattttctttattagcggctgaatcaggcttaaggcctaaaagttcgagtgaatccatgacatgttcacggacaccaaagtcgtgttcaccgacaccagctgtaaaggcgataccatctaggccacgcatttcaagggtataagcaccaacatagcgaatgattcgattaatgaaaatgtttctagctaagtcagcacgcttcttcttttccccttcgagcttagtcatgtcaccacgtaaatcacgcatatctggtgaaatgcctgaaattcctaacaaaccagattcgttgtttagaaccttaagcatttgatcagcatcaagattttcctttttcatgacaaaagcaagtaaagaaggatcaacatcacctgaacgggaactcatcgtaatacccgccattggtgaaaagcccattgaagtatcgaatgatttaccatctttcacagcggtaactgaagcaccagatcctaagtgacaaacgattaatttcaagtcctttaagtcgcgtttcataatttcagcggctttttgactaacatatctaaccgaagtgccatgtgcgccatattttcttgcaccgtatttttcatagtatttatatggaagtgagtacaagtagtgcactggatccaaggtttggtggaatgaagtatcaaagacagcgacttcagggacgccaggcaatactttcatgaaggcattaatgacatcggcttcagcggtattatgaagcggcgcatattgtttcaaatcataaatcttttgtagtgacttttcatcaattaaggtggagtccttaaattcttcaccacccgcaacaattcgatgtccgattccgatgatttctttaggatcgtcaattaaatcatacttttttaaattttcaagcaagattgtaacggcagtttcggaatcaggaatgtcaactttttcttggtgtttttcacctttaaccttgattgtaaaggtggagccgttaagcccaactcgatcagccatcccttcgctgataactttttcatcaggaaaggtgaaaagcttaaatttaaaagaagagctacccgaattaatcgctaaaatttttttcataaattatgcctctttttcttaatttttgcagtgcaacctatccagtaagggcatgcaataaagaaaatgccactaatctgctttaagtaagttcttgcagtaatagtgtcaacgtctttattatacaacttttgctgtaagctcttacagatatgaaactgtcaaatcttttgtgtaaatagatctttctcgtaaattgattttttaattatttatttaatcaaagtaggattctaaggtgtcctgaacctgaccaaagcctttatgaattcgattgaaataacggtcattgtagctcattgcctgaatgccaataaaagcatcaagcgactgttcagttggaaactctgccttaggcttagctttgcgcttgatcacattgttaaatgattcaatcatgttagtcgaataaattgaagctctgatctgcttgggatagttataaaagaccagcagatctggttctatgtctttcaagcttctgataacatggctgtaaaccttgccccatttggtatagaagtcatgcaggacagctgtggcttcttctttgtttgtctgttgatgcacctgtttgaattcgttcatgatcttttcacgatcgtcgacgcgtactttagcgcagatattgcgcatgacatgaaccaaacagcgttgaaaatgagctttaggataagtcctggccaaggctgttttcatgccaacaacaccatcagaaagaaaaagctcaacttgctttaagcctcgggatttcatgttttgaagcatatctgtccagacttcaatgttctcgctaggcgcaatgcagtagtcaatgacctccttgtgcccattaggcttgatgccaatggcaatatagactgcttcacgctcaaatgtttctcggcgcaaaggaaggtatgtcgcatccaaatagacgcagaaaaacttgtcgcttagcttgcgtttgtggtaagcctcaacctttggaatcatctgcttggaaatatttgatacctgagctggactgtaatggctgccatacatcttttcaattagatcggctatttccctggtggtcacgcccttggagtaaagcttgataatcatgctttccaagatatccgagtgctgcttgtagccaggcagcgtgtgctgatgaaattgaccgttgcgatcccggggcacttgcacttcaattgggccaaattgcgtatcaactttgcggaaataagcaccatttctagagttgccagtattccagccatttctggcatagggatcatagcccagaaaggcagtcaattcagcttctaacaagttattaacagcctgttgtagctctttgcgcaataaatcatttattttgtctggattgaatagagcttgagcaaaatctttggtaaaatcattcatgaaggagttcttctttctgtatgtgtttttttgttcaaaccaatcatacgagaaaggaactcctttttctaatgtttaaagaaataaatttaaggaatcattcatccttacacaaactattttacagtctcacagatatttttttattactaaaatttatatataaatttgattgatcatatataaatttagaatatcaatttgcaacaaaaccgcttacaaactataatgaaattaacatacaatatatattgagaggagaaaaacgaatgacccactactacgaaggctttccacaaagtgaccgcgatgaaaaaatcaagatggtgaatgtggatgaacttgaagaacgtgttaagaaggtaatgccagaaggtgcatattattatattgcttcgggtgcagaaaatgaatggacctggcgtaacaatactgctgcttttaatcattttcaaattgtacctcgtgctttgactgagatggctgatccgcaaactgatactgattttatggggatgcacttaaagacgccaattatgatcgctccaattgcttgtcatggaattgcacataaagatgcggaagtcgcaacgcaaaagggtgctgctatggctggtgcgctctttagttctagtacttatgctaataagagtgtagaagaaattgcagctgcagctccagaagcaccaaggtttttccaactttatttgagtaaagactggaattttaatcagatggtttttgatgcaattaaaaaagctggttatcaaggcattttcttaaccgttgatgctttggtatcaggttatcgtgaagcaaacttgcggactaactttacttatcctgtaccattggacttctttaagcgttaccttggtgcaaaaggtaaaggtcaaagcgtagctcaaatgtacgcttcttctgcgcaaaagattggtcctgaagatgttaaaagaattaagaaagaatcaggtttgccagtctttgttaaaggtgttatgtgtgctgaagatgcctataaagcaattggagccggtgctgatggaatttacgtaactaatcatggtggtcgtgaagttgatggtgctcctgctaccattgatgttttgccagaaattgcgcaagcagtaaatcatcgggtgccaattatctttgattcaggtgtccgtcgtggctctcatatctttaaagctttggctttgggtgctgacattgttggaatcggttgcccatatctttatggtttagccttaggtggtgcgcatggagttgcttcagttattgaacaattaaatgatgaattaaagattgatatgcaattaacgggatgcaagacaattgatgatgttaagcatgctaaattgacgcacattgcttatactgctgataatttgccatctaatactgatccaagcagacgcaaggaatatccggtaactgacgaaaatcaagttaagcaaactgatgcggtatctggtgcttctaagttagaaggaaagccagctccggaaccagagactgataccacaactggtgcttcagtaagataaagcaaaaatataattaatattttcaatatgattgtcattgaataaatgatagtcatatttttttactatcaagaactcagcggctacaatcaaggtgaaagcgattcgatttttggagaggaaaattaaattattgaagagaataatgttttgactgatactgaagagcttaaaatcttgagtgatcttgttgcaataaaatccgttaatgataatgaaattttagtagcaaaatatttacaaaaactattaggagaacatggaattagttcacgtttgttggaatattccacaactcgcgcagatttatttgctgaaatcggaacaggccatcccattttagcaatttgtggtcacatggatgttgtttcaccaggtgaattagatcaatggcatactgatccctttaaattaaccaataaggatggtaaattgtacggccgcggagcgactgatatgaagtctggtttagctgccttggttattgccatgattaatattcatgaacaccatttaattaagcatggtagtatcaggctgctagctacttttggttggtgaaccttctggctacagtattgccattgctcataagggttcgatggatactaagttaacttcccaaggcaaggaagctcatagctcaatgcctgaaaagggttataatgcgatcgatccattaatggatttattagttaaggccaacaaggcttttagagaaacagataaaaacaatccagacttaggtaagttgacgttcaatactactgtttttactggcggggaacaggtcaacatgattcccggagaggctaccgcgcaaattaatgtgcggactattcctgagttcaataatagtttggttgaaaagaaattaactgaattagttaaggcagaaaatgcgcaaggagctaaaatcaaaatgtacatctatatgtcggaaccttcaattaaaactgacggtaagtctgaatttgtaaaattagcccaaaaaattggagcaaaatatgcggaaaagccgattccaacagttgctattaaaccagtaactgatgcttcgaatttgattgccgacaaaggacctagctatccgtttgccatgtttggtcccggtaatgacacgccgcaccaagttaacgaatatgttgatgaaaagatgtatttgaactttgtgaagatctatactgaattgtttgtggcctatttgaataaataatttggaaagtaataaagagcctaggcaaaattttagcctagacttttttattgtattttgaagtattctttagccgcatcactcatccgttcaggggtccaaacaggataccagacaaattctacatcaacatttttaacttcagggacttttttaacggctgttgtaatctgcttgatcaaataatcagtcaaaggacaggcaggtgtagttaacgtcatattgatgagacagatcccatcttgatcgaggtcaatttcataaatcagccccaagttgaccacatcgacgtttaattctgggtcaataacttgagctaaatgttcaataatatcgtttttaattgttttgctatcacgcattgtgttacctacgcatctttaccaaaaatttttgctttaattgcttgacctgttggtgtaccagctaaaccgccgattccagtttcacgcagagatgccggcatttgatgaccaactttcttcattgcttcaatacattcatcagctgggattacacttgtacatcccgctagcgccatatcagctgcgataagtgcattaccagcgccaataccatttcttttgacgcagggaacttcaaccaaaccggcaatcggatcacagactaacccaagcaagttagacatcgcaatcgataaagcttgggcactttgttcagcactgccaccagctacttcaactgccgcggcagcacccatggctgaggcactaccgacttctgcttgacagccgccagttgcccccgcaatttcggcattattggcaatcaccatgccaaaaccgccagcagtaaaaagaaagcgaatcatttgctcttcgctgagctgtaatcttttttctaataaaaatagaacgccaggtaaagtgccggaagaaccagccgtcggggtagcgcagacaacgcccatcgctgcattgacttcgttagtggctatggcattttcaactgctgccatcattgtatcgcctgaaagtgtgtgtcctttctcgcgatattttttcagcttaattgcttcgccaccagttaagccagtttttgaaaagacaccgtttccagattcacctcttttaacggcagctcgcatagtttgcaagttatatttcatgcgctgccagactttttctcgtggcaagcctgatagttgacattcttgttcaataattaattcagaaataggtttgtgcgttttttctgctgcagcaacaatttccttaatatggttatacataatattgccctatgttataaacaaataatattctcaaattttttatttagttcttgcaataaatcaggatgaagataattttctacatcatattcataaatattatagtttttagtatgaaaaattcgtttgcgactaaagggtgctttttcgtgtaagagcgcggtaagctcttgttcaatgcgaatatttttgtgtggatcaactaaaataataataggtaatgcaccagcaggttgaatctcggtattatgtaagacaattttgcgaatttcaattgcaccaccaccgatagagcatccagccaattccactttctttttatcattagacatatttaaaatagcagtattagggtgaccaattgggctaggaccatcttcttcaacaaaacgtaaatctacgccgcgctggcgtgcaatctcaggtgcctttggtacgcgtagatcgtctgagtcaaagcctaaaatacctgccgcaatagcatagtctgttccatgaccacggtgagtttgggcgaaagagtcgtaataatgaacggtaactttactcggggtaccgccaaaaagtttgtaaccagcgcgtccaatagcgacggctccggccgtatgtgaacttgatggtcccaccattacggggccaataatgtcaaaaacacttttataccgattagtcattttaatccctgctttgtaagttattctgtttttaattataacgaataataaagaagattaagaaagttttttggagactgtaaaatagtttgtgtaaggatgaatgattccttaaatttatttctttaaacattagaaaaaggagttcctttctcgtatgattggtttgaacaaaaaaacacatacagaaagaagaactccttcatgaatgattttaccaaagattttgctcaagctctattcaatccagacaaaataaatgatttattgcgcaaagagctacaacaggctgttaataacttgttagaagctgaattgactgcctttctgggctatgatccctatgccagaaatggctggaatactggcaactctagaaatggtgcttatttccgcaaagttgatacgcaatttggcccaattgaagtgcaagtgcctcgggatcgcaacggtcaatttcatcagcacacgctgcctggctacaagcagcactcggatatcttggaaagcatgattatcaagctttactccaagggcgtgaccaccagggaaatagccgatctaattgaaaagatgtatggcagccattacagtccagctcaggtatcaaatatttccaagcagatgattccaaaggttgaggcttaccacaaacgcaagctaagcgacaagtttttctgcgtctatttggatgcgacataccttcctttgcgccgagaaacatttgagcgtgaagcagtctatattgccattggcatcaagcctaatgggcacaaggaggtcattgactactgcattgcgcctagcgagaacattgaagtctggacagatatgcttcaaaacatgaaatcccgaggcttaaagcaagttgagctttttctttctgatggtgttgttggcatgaaaacagccttggccaggacttatcctaaagctcattttcaacgctgtttggttcatgtcatgcgcaatatctgcgctaaagtacgcgtcgacgatcgtgaaaagatcatgaacgaattcaaacaggtgcatcaacagacaaacaaagaagaagccacagctgtcctgcatgacttctataccaaatggggcaaggtttacagccatgttatcagaagcttgaaagacatagaaccagatctgctggtcttttataactatcccaagcagatcagagcttcaatttattcgactaacatgattgaatcatttaacaatgtgatcaagcgcaaagctaagcctaaggcagagtttccaactgaacagtcgcttgatgcttttattggcattcaggcaatgagctacaatgaccgttatttcaatcgaattcataaaggctttggtcaggttcaggacaccttagaatcctactttgattaaataaataattaaaaaatcaatttacgagaaagatctatttacacaaaagatttgacagtttcgttttttgcaattttaaccgaagttttgtcataataatatgaaaagtgaaagaggttggttaaatgactaaagaaaaagcagaattaaaacaaaatttggagcatctagctgagcaaaagggcagccagcaggcagtttcttatcaagacttgtttacaccacaattgatgcaaaagtatactagttttgctactattgacttttttgtcagagaattgggcgtgaaagactttacgcaaattgagcagatggcgatagatcaagtcgatgaatttgttaaaaaagagaccaagtttgctagctgggaagaaatgcaacaaaaggcggttagcgagtacatgatgaagttattttagcaacaaaaagcgagttagtattaactttaaaactaactcgctcttttatttactatgttaggtgaatgacttgagcacctaattcatcaataaagcgctgatcatgttcaattactagaatagtaggatgatattttttaattaattgaataatttgttcttggttaaagacatctaaatagttcaaaggctcatcccaaagatacaaatttgctggttcaagtaaggacttggctaagtagatctttttttgttggcctgaagacatttgattaattgaattagtgaatatatcacgttcagtacctaatttgtgtaagatattgagaaaatcggcatagttaaggtggtgcttttgggcaaaatcttttaatgataggttattagattgttcaatctgtgataaataggagattgaaatcttatcagctgaatgcaatttgccagtaattgttccagcaaaagtattagtaattgccttaaacaaactagattttcctataccgtttttaccagtaatcacaaattggtgaccacgcattaaatcaaaggtagtaggttggaaaaggggaagcttgtcataagcaaggctaactcctttagcagtaattagatgtttatgatggtcggggacaaaattcatagctaggtcattgtctgcttcaatattttttaaaagaccttttctttcttcgatatttttatctaatcttgcttctacatttttggcaagtttcatttttttggcggctttgtgtcccatgaatcctttatcataaactgtacttctatgtcgaatatcgcctttcatcttggctcccgcatttttgttgctttcggaacgctgggcaaaagtttgcatcttttgttgactggcatggagatttttaatttgcttttctaactttgcattataagcgatattagattcatcctctaattccttttgtttttcataacgagtatagtttccttgttccagcctaattttttgcatttcaattgctagggtgtgatcgacaactttatctacaaaatttcggtcatggctgattacaattaatccttgttttttattatgcagatattgtgctacttgatttcgtgtatcttcatcgaggtgattcgttggttcatctagtagggcaaaagaatgttgattaataaaacaaagcgccagtaaaatttttgtttgttcaccgccactaagtgttgaaaagggctgccaaatgatatcttctttagcatgaagcagatttaattctcgttttaactcccattcctcaaaattaaactgttcttgtaaagcataaatagtaaggttatcgggatcattaattacctgaggatagtaattgaattctaaatcactttgaatagttccttgatattcgacctgttttagcagcattttcataaaagtggttttgccgcgaccattacgaccgattaagccaagtttccaattagaatcgagatttaggtttaaattatcaaaaattttatcctgaccgtcataggcaaatgaaacgttttttagtgaaattgtagacataaaaaagcaccgtcctctcaaactgtgcttatgatctgagaaaatggtgcctgatagattagtccaagttggctaatctataattattcttaatttaaattaaagaaaatcacgcagactaatttctgatcacaagcaaaaagtacatccttaaactagtagaatgcattattttttacttaacgaaaatcagaaattaaaaacgcatcggcgtgattcctcctattacttgaattgattaatctggcaatactttaccatcaaatataattatttgtcaatatttttatgataattcatttgcaagctgtgattaataaggagactgtaaaatagtttgtgtaaggatggatgattccttaaatttatttctttaaacattagaaaaaggagttcctttctcgtatgattggtttgaacaaaaaaacacatacagaaagaagaactccttcatgaatgattttaccaaagattttgctcaagctctattcaatccagacaaaataaatgatttattgcgcaaagaactacaacaggctgttaataacttgctagaagctgaattgactgcctttctgggctatgatccctatgccagaaatggctggaatactggcaactctagaaatggtgcttatttccgcaaagttgatacgcaatttggcccaattgaagtgcaagtgcctcgggatcgcaacggtcaatttcatcagcacacgctgcctgactacaagcagcactcggatatcttggaaagcatgattatcaagctttactccaagggcgtgaccaccagggaaatagccgatctaattgaaaagatgtatggcagccattacagtccagctcaggtatcaaatatttccaagcagatgattccaaaggttgaggcttaccacaaacgcaagctaagcgacaagtttttctgcgtctatttggatgcgacataccttcctttgcgccgagaaacgtttgagcgtgaagcagtctatattgccattggcattaaacctaatggacataaggaagtcattgactactgcattgctcctagtgagaacattgaagtctggacagagatgcttcaaaacatgaagtccagaggcttgaagcaagttgaactctttctttctgatggtgttgttggcatgaaaacagccttggccaggacttatcctaaagctcattttcaacgctgtttggttcatgtcatgcgcaatatctgcgctaaagtacgcgtcgacgatcgtgaaaagatcatgaacgaattcaaacaggtgcatcaacagacaaacaaagaagaagccacagctgtcctgcatgacttctataccaaatggggcaaggtttacagccatgttatcagaagcttgaaagacatagaaccagatctgctggtcttttataactatcccaagcagatcagagcttcaatttattcgactaacatgattgaatcatttaacaatgtgatcaagcgcaaagctaagcctaaggcagagtttccaactgaacagtcgcttgatgcttttattggtattcaggcaatgagctacaatgaccgttatttcaatcgaattcataaaggctttggtcaggttcaggacaccttagaatcctactttgattaaataaataattaaaaaatcaatctacgagaaaaatctatttacacaaaaaatttgacagtttcagattaaatttcttcactactcaattcaaacatattaataattgatttaaacatagataaaagttgtttaactattaaaaatgaattttgtgaatataatgttatcgataacagaaatcatttttatattgcaaatgaaagcgcatacgtttattgttgaatttgaaaaaacatgattttgtggaggaatttatttatgaataaaaagagtggtcataatatcaaatttaaatcaatttttgtatgtacttcagctattatgagtctttggttaggggcaaacttaactacgactcaagttcatgctgcagaagacaatgcagctcctaaaagttcagaagttgtaggccaaacgaattctagcaaagataatgcagctactgctactgtacaaaatcaaagtaacgcaaaagcaaagcagcgtcaacaaggtgtagctcctcaaaacgttcctacagttttggcagccaaaactaaagatgagggaacaaataactctccagcacgtgaggaagttaaagatcagactaaagtagttattcactacaatggtgatggtgaaaaatgggttccttatatttggggtaagaaacctaatggtaacggcaatgaatacaaatgggccggcaaagatgataatgggtattactcggttattgatttagataaaaactatgaccaagtaggagttttaattaaaaccaaaggcagttgggctggtaaagacggtacaggtgctgatcgtagcttaaatgttagcgataatggcaaagcggaagtcttctataaagcaggtagtgatgatgcccaaaaggtaacaccagagtaccattccgcaaatataaatttgcattattacggtgatgaccaagttaataaggttaatgtttggacagataaggatcaagataataaacaacttattagcttaaccaaacaaggcaatagtcaagatggctcaatcaaattagacaatactgattttagtaaactttttgttgcgccagttggttctgatgaaataacaagagaattcactccgttaccgggtaataaggcgacagatatttatttagttaaaaatgatacagaagcttattatagcaagagttttgccttagctgatcaaagtctatcttctgcatatatgacttcaccagatagtttgactgttgaagcaggtaaggctactactgtcgataaaattaaaggaaaacttagtctgcgaaataatagtattgatcatattgaagcagtcgatgctaatgctgatggtaaagcaaagaaatttattattcataccaaaacagatattgatattttaaaggataaccaagttggactagggatgaactttaaaaatgttgatatcggtccttatgttcgttccaaagcttttgacgataaatatgcctatgatggtgacgatctaggctgcacctatgatagtaaaaagacgcaaattaaactctgggctccaactgctaaagatgttgaattgaatttatatgatagtgttgataatagtgccaagcctacgaatgttattgctttgacaagaggcgatagaggtgtttggactggtattattaagggcgataaaaaaggctgggcttatgattttaagttaacttttggtaatggcaaaataacacagactgatgatccatattctaaagccgttactgtcaatggcgttagaagtgtaattgaagactacaataatatcaaaccgacagattttaaccgaatgccttcattctctaagccaactgatgcaatcgtttatgaaatttcaattcgtgactttagtagtgatcctaactcaggaattaaagataaaggtaagttcttagggatgattgaatcaggtaagacaccaactggacaagttactggtttagactatctcaaggcattaggcatcactcatgttcaaattatgccttcatatgatttcgctagcattgatgaaactaagagtttaaagaatcaatacaactggggttacgatccaaagaattatgatgtgcctgaaggatcatattcttctgatccaactaatccaactgctagaattatcgaaatgaaagaaatgattaatggcctgcataaagctggtattagggtcattatggacgtggtatacaaccatgtttataatcctcaagagcaagcttttgaattaacagtgccaggatattatttccgttacgatgctgataataataccacaagtgatagtggctgcggtaatgacattggtagtcaacgtaaaatggttcgcaagtacattgttgactcagtagtttactgggctaagaactacaatctagatggcttccgttttgatatcatgtccttactagatcgagagactatgaatgatgttagagctgctctagataagattgatcctggtattattacttatggtgaaggctgggaagttggtaaccagaaatatactagagaagaaggaacgacccaatacactgcggataaagttcctaatgttggtttctttagtgatgatatgagaaactcggttaaaggtaataatgatggctccgaaccaggattagtaattggtaacggtaatgaaaaaaactttgataagcatgctgtcttgtttaccgatagttttttaagaggtaaatggttacataatgattcttgggagccacataactatgcaactccaagccaaatggttaattatgccgcttgtcatgatggtaagacgttgtatgattacatcaaggctgcaatgccaaatgaatcagatgagaatattgccaggagagtaagattggctaactcaatgatcatgctttcacagggtatttctttcttccactcaggtcaagaagcattaagaactaaaggtggcaattcaaattcatataattcaccagtaaatattaatgaaattaattgggaaagagttggtgctaataaagcatcagtccaatatttccaaaaattggctaaattacgtaaacagctgccaattttgcatttgaatgatttcaataagatttatgacgagaatgttactaaaattattagttatggtagagaaaccaaagataaaaacatcaagggtgtatttgagtacgaatataatgttaatggcaagaagttattaattgtctttaatgtcaacaatgataaagttgctctaaataatgttgatttatcacatggtaagaaattgttagatagtgatggcaatgtgaaattaagtgataaaactatgctggcaccattaagtacacttgtagttgatgaagatggaacaatggttttaccagacgtgccaaaaccagatcagcctgtaagtccaaccactccaggtgataagccaggtaaaccaactacaccagaaaatccaaggattccggatcaaaagccagccaatccaattgttccgcaagaaacaattattacacctgaagctccaagtgaaaatagtattatagacaatactaaaaatataattaatggatcagaagagactactacagtttctactcaggataatacaaccactgaaatattattgacccataatgcttatgtgtatgacagtgaagcaaatcctatttatcaaaatgataacaagcttgtcttgaaagctggagatacaattaagcctttggataatggtaaaaagtatagtattaaaggtaagttgttctataaagtagctaaaaatcaatttgtcaaagttgctaatactgttagttactataagttagctcataactcattcgtttataataagcatggtaaagcagttaagaagaatggaaagcgcattttacttaagaagaataagcatatttcacttcattctgataaggtcgttaagattaaagggaagaaattctatcaattaaaagatggtagctttattaaggctagaaatgttaaaagaattggttagatttagatagttaattaaaaatattaaaaaacaagattgtttccaaaatgggcaatcctgtttttttaatcctgattaatcaagctaacgggcaaagtataaacactctccaatgataccgctggatcattaatttcgcaatctctttagtccgttgccgcgcactaattaaatgtgggaataggttctgaatcaattgtgtgccgtcaaatcctgtaattaacgattttttatttaaataatcgttgcattctttagccaataaagccgtaatgtcatccgtacaacaaatcgcatcgtaatcgttatctttcaaaaattgaaggatagcgattacgatgcgataattgattcacgggcgctaattgagcgtaaatcaaatttaacgtcaaaggtattaaacacacacatcatccctttgatacgatcactgattggataatagtcttctttggaaccagcaataatgattactttcttctttttttgctttaaaaccgactttgcaatttgcatctccgcatcatagttattcgactgcacagtagggatctgcggactaattacccggtcaaaactaaccaccggtagattaagcttgccactcttctttgaaatctgaattggcgagctggtaagtaagcctacgatctttttttgcttatatttatccaaataatactgcatatcttgctcttgataatgatctaaatgcaaaatgcaatcataacctttatcctgcaaaatagtagccaagtattcatacagttctgaatagaaaggattattgatttgcgaaaaattgatttcaattaagtttaattctgttttagcggaaattgcattcttgggtttataacccagttttttgatagcttcctttatttttaaagccgaatcaatgccaacgtaaccattctgattaagatatcgcgaaacggtggcaatagaaacgccggcttttttagctatttctttaatagttactgccatgttttacacctttatatgtaaatcctacacactttctatcagtaagtatagcatattctaaaacctgaattgtcaaattaagtgcaacagttaggctatgaggaaatatattgcttgaagagttcttctgctgtgtgatattgaaggattcgacgatgtttgcggttaatggcatcagttgcctgttgaacataagcagctgacttatctttcatgcttttgcctttagggaagaattgacgcagaagtccattgcagttctcattggtgcctctttcccatggagaatatgggtgggcgaagtagatctggcagcctttgatcttggtcatatccgcaaactcagagccattgtcaaacgtgatcgatttaaaccaggcaggatgtctgtcaatctcattttgaagcagccttgggcatgtgcttgcccgatagtcaggaatcttgataactacttcaaagcgtgtggttctttcggtcaaagtcattaaagcaggctgattcttgcgtctgacgcctttaaccagatctccttcccagtgcagcggcgtttttctgtcttcaatctctttaggacgctgttcaatggaattgccaagatgcttcttgtgcaaagcatgaccgctatggccgtgatgacgcttgttcctgcgtcttttgagcttcataggcagatcaatattgcttatgtccagcaagccctgatcaatatagcgatagacggttggtgtgctgggacaagggtagcctggcatttgaattcaccaacgaattcatcgatgctggtggcatcaaatttagctttaaagcgtctggagagcattctcaaaaagacagcataatgcttcaatggattgcgctgatagcagtttttgcgacgcttctcataatgaagctgtgcagtatcagcgtaatagtgctcatacaataaatagctgctgtctctttgcaggacgcttccgcgtttgatttcgcgactgattgtcgacttatggcagccgacttcttgagcgataacagtacgggaagttatgccggaatccagcattgcttgaatttgtccacgttgtacgctggttaattgatgatagtgcttagaaatgctagaatttgaattggtcatgaagatcttcctttcttgatttttcgtcacttcaagtttaggtcttcatggcctttttgtttaacacttggtgttgcacttcaattttaaatccgggtccattattaattcctttcatagaaaactaaattccttttctaaaggggtcaagagctattatatacagttttctcagcagttacattcgcaaaaaagaaaaatgctaaatttatttaaaatatttagattttttatgcaataaggacaaatagctaggagaaagaacaaagaatatctccccatctattgatgtaacgctaaaacataatttactttctttgtaattttgtgtatactaaatatacacaaaaaagaaagaggcgtacaactatgactgtaaaattaagaaaagttggaaattcaaaaactttaacagttcctaaagatataataattactagtaaagagtatactgtgaaaaatgaggggatgaatatagtttttacacccgtcgtgaagaaaaagaaaaatatttttgcaaccaaagaatggcaaaattatgattatcaaaaagacatagaaaatgacgtggaactacaatcagtaaaaccagtgggacgtgaggtagttgattaatgatttatccgaaaaagggagatattgttaaagcagatgcagaacctcattccggacatgaaatgggtggccataatccgcataaaggtaatattagaagacattatgtggtaatgagtaccagtgcctataataaatcaacacatatgtttatagggatgccgattactacttcagataaatatcaaggcaacccacattacgagccaatattaattccaggcagtaatggcactggagtaaaaggttatgttgttttatggcaacttcagaattttgactttgaatctagaaatggagaaattgttaatcacgtaaatattcagctattagacaaacttcaaggtttcgtgaatgatatggtgggactagaataggtaaaacaattatgccaattttaaggctagttcgattatgctgagaggacgattctgaggtcaagttcgactgcagaggttaaaattaatcatttaatgcaatagaatgctaattcttatttttatgggaaattagcattcttttttgtactttctaactatgtagaataatgagattttattctacatagtacatctaatcatgcattattctgctatgccaattttggggtgtgttgattatgtagtataattagctatagactaattattcaacatagagtgacgaaatacttgtatatcaaggactaatataaaaattgacagaaggagacgtaaattgaagcataaagatactcgtccaattactgatccaataattttaaagaagtttttgaaacatttacgtgaagatactagtatgggagaaagaaactatgctatatttcaaaccggtaaagcaaccttactacgggtaagtgatgttctagctttgaaaaagaatgatgtctttcaagccaatggcagagttaagaaaaatgcttatatcgttgacaaaaagacaaaaaagcctaaccgattatatttaactccagttagggatgttttagaggattactatgattggctgcaagaatatgaaaagaagcatccctacacgaagctgttttcttctgaatggctatttccaagttctaggagattaggtgaggatgttccaataagagaaaatagtttttatagaatttgtcatcagaccgagcttaaaattggggttaattggattggctcacactcaatgagaaaaacaggagcttttatggtttatcagcagactaatcataatactgctttagttatgaaaatgctaaatcactccagtgaagcaatgactttaagatagagaccgtaaaatattttgtgtaaggatgaatatttccttaattttattttcctgaatattagaaaaaggaatccttttcccgtatgattgatttgaacgaaaaacatactagaaaagagattccttcatgaatgattttaccaaagatatggctaatgctctattcaatcaggataaaattaatgatttatttagacaaaagctccaacaggctgtcaatgacctgcttgaatccgaattgactgcctttttaggctacaatccttatgagcgcgatggctggaataccggaaattctagaaatggtgcttattaccgcaaggttgatacgcaattcggacaaatagaaatcaaagttcctagagacagaaacggtgagtttcatcaacacactatgccagattataaaaggcatactgatgttttagagcaaactgttatcaagctctattccaagggcgtcacaacccgagaaatcgctgatttgattgagaaaatgtatggcggctattattctccagctatggtttccaatatttctaaagaaatgattcccaaagttgaggcatatcatcagcgacatctgtcagataagttcttctgcgtttatctcgatgccacctatattcctcttaagcgggtcacttatgagcgcgaagcagtttatatcgccatcggtatcaaacctaatggtcataaagaagtgattgactactgtattgcgcctactgaaaatattgagatttggagcgaaatgctcaaaggcttcaagaggcgcggccttgaacaggtagagctcttcttgtctgacggagtagttggcatgaaagaggctatctgccagtcctatcctaaagcgcattttcaacgctgcttggtacacgtcatgcgtaatatcagtgccaaaatgcgggttgacgatcgaaaaaagcactggatgaattcaagcagattcatactcagtcaaacaaagaaatggctgtacaggtgctgcatgaattctatcaaaactgggaaaaagcctacaaaaacgtagttagagatcttagacaggttgagcctgatctgttaaccttttacaactatccgccagctattagagcttcaatttactcaactaacatgattgaatcctttaacaacaggcttaagcggaaaaccaagcctaaaacagaatttccaactgagcagtcgcttgacacctttattggagttcaggcaatggattacaatgaccgttactttaacaggattcataaaggatttgggcaagttcgagacaccctagaatcctattttgattaaaagataaataaaaaagtcaatcaacgagagagattatttacacaaacttcttgacagtctctaatgtcttaactgttaacttaggaaaatgtcctaattgtagtaagtatgacataatttcctttattggaggttatagttagagtgaataggattgatttaactatgaaatatgatgaacagtacaaagtcattaaggatcttgtagatcacaacggcaataagaaaagagcagccttgaagctaggaatatccgttagacaaataaacaggagaatcaagcagtatcaagctaaaggaaaagcggccttcgttcatgggaacaaagaccgcaaacctgttaattgtctcaccacagaaattaacaatcaaattgtaaccttataccgtactaaatatcaagactgcaatataaaacattttgtacagctgttagatcgctttgaggacattcatgtctcttataccaaagcttacagcctgctcaagcagcaggatattctttcccctaagccttggagaaagactaagcgtgccttagccaaaaagaaatggcataagcagcaccctaagcaaagcaaacaagaagtcagcgctgcagttgatcatcaactagctttggcagatgctcatcctcgccatgaaagatgcaagtacttcggcgaagaaattcagatggatgcttctgtcttagtctggtttggtaagcgtaaggcttacctgcaccttgcaatcgacaacgctactggcattattgttggggcttattttgactgggaagagactttgaatggctactatcacgtctttgagcaaattcttaaggaatatggcattcccctttgctttaagactgataatcggactgtattcaattatgagactgctcaaaccaaagctgcccataaagatgtgctgacacaatttggctatgcctgcaaaactcttggcgtagatctaaaaactactagtgtttctcaagccaaaggcatggttgaaagagctaaccaaaccgtccaaggtcgccttaagccagaactaagattggctggaatcatgacaatcaacgaggcaaataaatacctgcatgatgtgtttgttcctgactttaaccaaaacttcagtcagactagtcgtaaagcctggtatgtttttgaaaaggctcctgatgactgcaaaatcaattataccttggccgttctcactggcagagtgtttgatagcggctcagctatttctttcaaaaacaagctttatcaagcaacagatgaatatggcaaattagtctgcttcatgaaaggaactaaatgtctggtaattgaagccctagatggacaactgctaacgacagtagatgagcatgtatatctgcttaaagaaattcctaagaatgccaaaatatcgccagaagtagaccaagagcctaaaaagaaaaggaccaagaaaaagtggattccaccaatgtcacatccatggaagcgagaatcattcataaagcaacaaaagagagctcataaataccatcaatacgtataaaaatagcggagagcaaattctccgctaataattaaataattttgggacattttcctaaattattgacatatttttatgataattcatttgcaagcgtaagtcctcgtaaattggttttccacctaaaatgtccagaatgtagtaagcaacgaaagtaacaataatcattggcaatacttgctggacagtcccaatcatttcagtcagtagcataattgctgtgaatggtgctttttctattgcaccaaaatatgcggccatggaaatcactaggatatgagggaagtacattggcaaaataatctgcaattttatcataatattggcgcaaattattcccaataatgccccaagaactaggataggcatgaaaataccaccaggtacggaagaatcatatgaaagcattgaaaagacaaaccgaattatcaagaataagatcggtagtaaaaaaagtcccatgatccaaaggctttgacattccaattcaaattgaataaattatcaattaacacatgtgaaccaccgagtaagtgggcattaaatagaccaactggaataattaaaattaaagcctgaattgtcaaattaagtgcaacagttaggctatgaggaaatatattgcttgaagagttcttctgctgtgtgatattggaggattcggcgatatttgtgattaatggcatcagttgcctgttgaacataagcttttgacttgtctttcatgctcttgcccttagggaagaattgacgcaaaagaccattgcagttttcattggtgcccctttcccatggagaatatgggtgagcaaagtaaatctggcagcccttgatcttggtcatatccgcaaactcagagccattgtcaaacgtgattgatttaaaccaggcaggatgtctgtcaatctccttttgaagcagcctttggcatgtgcttgcccgatagtcaggaatcttgataactacttcaaagcgtgtggttctttcagtcaaagtcattaaagcaggctgattcttgcgtctgacgcctttaaccagatctccttcccagtgcagcggagcttttctgtcttcaatctctttaggacgctgttcaatggaattgccaagatgcttcttgtgcaaagcgtgaccgccatggctgtgatgacgcttgttcctgcgtcttttgagcttcataggcagatcaatattgcttatgtccagcaagccctgatcaatatagcgatagacagttggtgtgctgggacaagggtagcctggcatttgaattcaccaacgaattcatcgatgctggtggcatcaaatttagctttaaagcgtctggagagcattctcaaaaagacagcataatgcttcaatggattgcgctgatagcagtttttgcgacgcttctcataataaatctgtgcagtatcagcgtaatagtgctcatacaataaatagctgctgtctctttgcaggacacttccgcgtttgatttcgcgactgattgtcgacttatggcagccgacttcttgagcgataacagtacgggaagttatgccggaatccagcattgcttgaatttgtccacgttgtacgctggttaattgatgatagtgcttagaaatgctagaatttgaattggtcatgaagatcttcctttcttgatttttcgtcacttcaagtttaggtcttcatggcctttttgtttaacacttagtgttgcacttcaattttaaatccgggattaaaattaaaggaatgatactgtgataggctgcagggatttttttaattttactgaaccatggctttagcgaaagtagtacatattgataaatgtatgccattattcccaaaaagataccaattaaaggtaaataatcgttaacgggtaaataaaggaatggtttgtttccaaaggctagaatagtaacgaagtcagctgaaaaagtggcggccaagacggctactactttttgaggtttaaaatcaaaagtaatttcttcgaccaagaaaagtgcaccagctattggcgcgctaaaggcggcagccaatcctgcagccacaccgcattattgtagcgttctcaaattttccttgttagatttaaatactttttctgctaatccttgaccaaccattgcgcccatttcaatacaaggaccttcacgacctagcattaatccaggacagatagctaataagcctccaataaatttccgccaaagaatggaccaccatggcatcttattttcatttaaaagaacagcctcgatttgtggtacccctgagccaattacttgttcaaggtaaggcgcagttattttacctaatgttattgcaataatgaacatcaataagatgtagggtacgatcagtactcgctgggctgccatttgcggataaatttgataaagcaacttcatagtttgatcaataatccagcgaaatgcgctaactataactccagtagttagcccaactgaaattgcttgaaccaaagttttagtcatgttggttgaaaaaaggttttgctaaaatctgttttgcatttttaatcattacatttccccatattacagacgatacatcctttttatcctaacaaaatatagcaaaaaaggcatttatgtttttgatgaatgatcttatttttgtaaaaattgttgttcccaatcatagacattttttatatgcttctttaaagcgttagaggctaacaaaatatcttttttctcaactgcagaaataatatccattatttcctgaaccgaggatttcatacaacgatcattgtctacgatggcataacgcatacgattggtttgagtacgtaaaagatcgatggttcgctgaagcgtgggatttccggtattttcagttaaaaatacatggaatagttcatcaagtttaagataagcttgccaatcatgttttgctaaaatttcttggaattttattccataatcattagccagttgtggatctaaattgggaaaatttttttccaaggcataactctctaatagagaacgtaaatcataattgtcttttaattcagctaatgtaatatggctaacgattttttttgtccttgacgaactagtaagccttcattttccaattgtttgattgcttctctaattggagtacgagacatgttaagtttaatacgcgtttgattttctgataaaagatgacctggcttaaaatgaccagtgtttatttggagactgtaaaatagtttgtgtaaggatgaatgattccttaaatttatttctttaaacattagaaaaaggagttcctttctcgtatgattggtttgaacaaaaaaacacatacagaaagaagaactccttcatgaatgattttaccaaagattttgctcaagctctattcaatccagacaaaataaatgatttattgcgcaaagagctacaacaggctgttaataacttgttagaagctgaattgactgcctttctgggctatgatccctatgccagaaatggctggaatactggcaactctagaaatggtgcttatttccgcaaagttgatacgcaatttggcccaattgaagtgcaagtgcctcgggatcgcaacggtcaatttcatcagcacacgctgcctgactacaagcagcactctgatgttttggaaagcacgattatcaagctatactccaaaggcgtaactaccagagaaatcgctgacttgattgagaaaatgtatggcagtcattatagtccagctcaagtatcaaatatttccaagcagatgctccccaagattgaggcttatcacaagcgcaagctaagcgacaagtttttctgtgtctatttggatgcgacataccttcctttgcgccgagaaacgtttgagcgtgaagcagtatatattgccattggcattaaacctaatggacataaggaagtcattgactactgcattgctcctagtgagaacattgaagtttggacagagatgcttcaaaacatgaagtccagaggcttgaagcaagttgagctttttctttctgatggtgttgttggcatgaaaacagccttggccaggacttatcctaaagctcattttcaacgctgcctggttcatgtcatgcgcaatatctgcgctaaagtacgcgtcgacgatcgtgaaaagatcatgaacgaattcaagcagatacatcaacagacaagcaaaaaagaagctgcagctgtcttgcacaaattctatgccaaatggaataaagcttatagccatgtcatcaaaggtttgaaggaaattgagcccgatctgctagtcttctacaattatcccaaacaaatcagagcttcaatttattcaaccaatatgattgaatcctttaacaacgtcatcaagcgtaaagctaagcctaaggcagaatttccaactgaacagtcgcttgatgcatttattggcatccaggcaatgagctacaatgaccgttatttcaatcgaattcataaaggctttggtcaggttcaggacaccttagaatcctactttgattaaataaataattaaaaaatcaatttacgagaaagaactatttacacaaaagatttgacagtttctattcatttggttctcctaactaagataattttacaacttttttattttttatattatttgcaactaataaaactaaaaacttgtatacaggttatctgtggtaaatcgttgacttacaaaatataagttttactatgtaattgtaagttaaattttgatagaaatgaggaaagaaaaatgactaaaattgcagtacttggtgcaagtggacaaattgctaaattagcagaaaatttatttttggaagataaaaataatgaattaattttatttttacgccatcctaataaattggataaaaaagatatcgatgatcaacgtgaaaggattgtcgtaggggatgcaagtaaattggatgaacttgctccggctattaaaggtgcagatatcgtttatgctaatttagctggttcaaatattgaagatcaagctaagacagttgttaaagctatggatgaagatggtattaagcgtttgatttggatttcctcgttaggagtctatgatgaggtaccaggcaaatttggtgaatggaacaagaatattttaggttcatatttgaccacttatcgtgcagctgctgatcaaattactgctagcgatttggattacacgattattcgtccagcttggttgaccaataaagatgaagttgactatgaaataactgaaggcgcaactaccccatttaaaggaactgaggtctctcgtctaagtgtggctagttatgtaaatgaaatagttaaagaccaaagtaaagacagtcgtggtaatgttggtttaaataaaccaaataccgacggtgataagccagcttggtattaaaacaaaaaaataaagaccagcttcaaactgaaactggtctttattttggcttaattatttttcgaattgtttgccccaagcccatggatcttcgtgccaggtctttaagacatcatattgcgtgctagaaatatgacctgactcattttcctttttgagtaattcagggtaggaaagaagcggagcatatttaacattagctttagcaaagttttcttttgcatccggtaggtagtaggtgaaaattgaagaaacgccaatgacgttgccgccatctttttcagttgctttaactgcatttaaaacggaaccaccagtggtgattaaatcatcgattaaaacgatcttatcatctttactgaagcggccttcaatttggcggcctttgccatggtcctttggcttaggacgaacatagatcattggtaagtgtagtttatctgcaacccatgcagcatggggaataccggcggtagcgacgccaccaataatagtagcctcagggaattctttggcgattaaattagctaaatcaccagcaatcatatcgcgtaattctggatatgaaaccgttaacctaaggtcggtgtaaattggagaaagcatcccacttgcgtaagtgaatggtttgtcaggtgagatagtgataattttttcttgaataagttgactgataatttgatccttatgcattttagttaaactcctttttaattgcttcatatgcagcttctgggtcactggctaaagtaattggccgtccaacaacaatagcgcttgagccccattctttggcttgcgctggtgtggccacgcgagattgatcgtctttagcattgccagcaggccgaattcccggtgtgacatataaaaagtcatcgccaactttttcgtgtaattcttttacttcaagtggtgaacaaataaccccatctgctccagagtgcttagccatttttgctagcgaaagaacttgctctttcattgacagtgcgcaattttgttcatgtgccaatacttcatcagaaatcgaagttaattcggttactgctagtaacttaggcacgcttttgccagcaggtgtacccgcgattaaaccgtctttagctgatttgatcatttgactgccgcctaaagcatgaacggtagtaaaagtaattcctaacttagctaattgtttagccccgttataaacggtattagggatatcatgcaattttagatccaagaaaatcttataaccttgctcagctaagtctttaaccacttggttgccagcgtgatagaataattccataccgactttgataaagacgttttctggtttgcctaatttagacaaaatcttatgcagttgctcttcattgtcaatatctaatgcaacaattacaggtttcatttttcctccacaaaaaaagtctatcttagcgcagagagacaccaaggatagacttttcctagataatttaagtcaatattttgaacttgcggtctctctgtaccgtttaaagtttgatcaaggtgaagtttaacacctcaaaagtaaaaatacaaataaaatttttgcttggaaaaaattataatcacgtgtagaatcatttcttgaaaaaataaagagtgtccgtgagcattcattttggaggaaaattatggttaatacacatgtaaaattaccaggtttagatttgaaaaatccagttatgccagcaagtggaacttttggcttcggcgatgtgcctgcagctaagaagtttgacttaaatgatcttggagcaatggttattaagacaactacgccacatgcaaccacaggtaatccgcaaccacagattgacgttttagatgatggggttttgaattcggttggtcttactaatcctggtgtggaaaaggtgattagtgaaaagttagaaccattgagaaagcaatatccagaattaccgatcgtggctagcgttggcggtgatagtgaagcagattatgttgaagtagcacaaaagctgtcaaattctggcttggttaatgctttagaaattaatgtttcttgtcctaatgtggctcaaggtggaatgagctttggcgtgcatgccgatgtggttgaagaattgactagaaaaattaaagcagttgtcaatattccaatttatgtgaagttaacaccaaatgtgactgatatcactgtaattgctaaagctgccgaaaagggtggtgccgatggcttatcgatgatcaatacattgctagggatgcgaattgacgtgaaaaaacgcagaccactgttaggccataatatgggcggtttatcaggtgaggctgttaagccaatagctattagaatgattagtcaagtgcgtcaaattacttctttgccaattattggcatgggtggcattgcttcggccgaagatgtggtggaatttatgttagcaggtgctaatgccgtagcggttggtactgctcattttaaagatagtattgcttctaagcatattgcagatgccttgccgcaagaacttgaaaaattaggcattgaagatatcaatgaattagttggtcaagtaaaatttaattagagcttgacaaacgtttctaattacagtaactttaaagcaatgaatgtcctttaaaattagtcccgtgaggctagcaaggcaggcttaacttaagtttcgactttactaaagctcctagtctcagttgagattgggagcttttttcatgggcagaattaggaggctataatggcaaaagaaatctgggatgcactagcaatgaagcgtgctttaacccgtattacttacgagatcattgaacaaaataaaggaaccgatgatttggttttggtagggattaaaacgcgaggcgtttacttggctaaacgaattcatgaccgtattcagaaattggaaggcgttgatgtaccagttggtgaattggacattaccttatatcgggatgatcgtcatgatgctagtttaaagcaagatccagttgtcaattctgatcaagttggtgttaatattgatgacaagcatgttgttttgattgatgatgttatctatactggacgaacaatcagagcggcgatggatgctttgatgcacgttggtcgcccaagttcaatcagagtcgcagtgctagttgatcgtggtcaccgtgaattgccaattcgtgctgattttgttggtaaaaatattccaacttctgccgatgaacaggttgctgttaatgtaattgataaggacggcaaagattcagttgaactgaaggctttaccaaaataaaaagaagatagttaaatatccaaccatttaattgactccagagagggccagaagggttgatttcttttcgtgtacacgggaagactctaggcctggagcaattaaatgcttcaggcttttttgtatagaaagaatagaaaatggaaaatttaaatcttgttaatttaccacattttgtgagtgttgaaaatttggatagtaatgaagtagaagccttaatcaggagagctgagtacttcaaaaaaggcggtgcaacaccacgtttaactaagccagtttatgtaactaatatgttttttgaagattcatctagaacacatacgagctttgaaatagctgaaagaaaactaggtttgacagttattccttttgatccggctcattcgtctgttaataagggtgaaaccttatatgacacttcattaattatgaacgccttaggtgtcaacttagaagtgattcgtcactcacagaatgagtattacaatgatttgattaacttaaaagaacatcaacatttaaatattggtgtgattaacgctggagatggtagcggtcaacatcctagccaatgtatgctcgatatgatgactattcatgaacattttggccactttaaaggcttaaaggttgcaattgttggtgatattactaattctagggttgcaaaaagtgacatggaacttttgactaggttgggcactgaagtttacttctcaggtccaagttactggtatgataaagaattcgatcaatatggtaagtatgaagaaattgatcaattagtttcaaatatggacgtgatgatactcttacgggttcaacatgaacgtcatgcaggcgatcctaatgaaaagacttttaatgctaaagcatatcacgaaaaatatggtattaatcatcaacgctatagtgcattgaagcccgacaccatcatcatgcatccgggtccaattaaccatgatgttgaacttagcggtgatttagttgaaagcgataagtgcatgtttgtcagacaaatgcaaaatggtgtgttcatgcgtatggcaatgatcgaggcagtattgcgcggtagacgacttggaggattagaataatggcaacagtaattaagaatggcacagtttatcaaaatggtcgtctaattaaagcagatgttttaattgaagatcaaaagattaaagcaatagggactaacttaacggcagataaagagattgatgcaagtggcaagctagttagtcctggactggttgatgtccacgttcattatcgtgatcccggacaaacttacaaggaagatattaaaaccggtagtgaagccgctgctcatggtggttttactatggtaggggcaatgcctaatgtaacgcctgtacctaatacgcctgagctaatgcaaaaaatggtacaagaaaacaatgaaaaaggtgtggttcatatttttcaatatggaccaatcactaatgatgaaactactgatgtcattcctgattatgcagcattgaaaaaggtaggtgcttttgccttaagtaatgatggtcatggagtccaaactgctcaaacgatgtatttggcaatgcaaaaagccaaggaaaataatttgatcattgctactcatgcacaagacgattcgctttttaataaagggatcgtgaatgaaggacctaaagccaaggaattaaacttgccgccagtaactgaattagcagaaacaacgcaaattgctagagacttgcttttagcacaaaaaacgggcgtccattatcatatttgccatgtatcaactaaaactagtgtggaactggttcgaatggctaaggcgcgtggaatcaatgttacctgtgaagtagcgccacaccatattttattaacagatgacgatattcctaaggacaacggttattataagatgaatccgccattgagaaataaggaagatcaagcggcgttactagtgggactactagacggtacaatcgatttaattgcgactgaccatgctcctcatgctcgcaatgaaaaagaaggtggcatgaagggcgcagcctttggtattactggtagtgaaacagcattttctactttatatactaaatttgtcaaagaagaaaaagtcttcaccttggagcagcttttatcatggctctccgataaaccagctaaaacgtttggcttaaaaaatgccggggtacttgaaccaggtaagccagctgatattgcgatttttgacttagaccatgaaactgaattaaaagaagaagactataagtcaaaaggcgttaatacaccatttacgggcgacaaggtgtatggtgaaactgtaatgaccatggttgatggtcaggttgtatacagaagggatgaacaataatgcggtatttaatcctagaagatggtagcatctatgctggcgagggttttggcgctgattgcgaaacagttggtgaagttgtatttacaacagggatgactggttatcaagaagcaattaccgaccaatcttatgccgatcagattttggttttcactaatcctttaattggaaactatggtattaccttggcagattatgagtcacttgagccaaggatcaaaggcgtaatttgtcaccaggttgcccgtcatcctgataattggcgaatgcagacaaccttaccaaagtttttggagcatttgaacattccaggtattcagggaattgacacgcgtgaattagttaaaaaattgagagttcacggtacattacgtggtaagattgcagattcaaaagaaaatgcagaaaaaattgcggcagaattaaagactaagaatgtaactcaaggtgtaattagccgagtatcaaccaagtcaccatatccagttcctggttcgaaacgcaatattgtggttatcgactttggaattaaacacagtattttgcgtgaactagcagaacgtgattgtaattgtattgttttaccatatacagctactgcccaagaagtattaaaccttcatccagatggtgttcttttgagtaacggccctggtgatccagaagaaatggtagaggcaactaaaatggtgcgtgaagtagaaaagcatgttcctttgatgggaatttgtatgggacaccaagtctttgctttagctaatggggctaaaacttacaagatgaaatttgggcaccgcggttttaatcaccctgtacgagagattgcaactggtaatattggttttacttcacaaaaccatggttatgctgtgtctgcagattcaattgacaaggataacttaatgattacccacgttgaagtcaatgatgggacggttgaaggattacgtcataagaaatatcctgcattttcagtgcaatttcaccctgatgcaacaccgggtcctcatgatgaggtttcattattcgacgactttatgtcaatgattgatcagagaaaggaagaagagcgtcatgcctaaaagaacagatattcataagattatggtgattggctcaggtccaattattattggtcaagctgcagaatttgattattctggtacacaggcatgcttggctctgcgcgaagaaggctatgaagtagttttagttaattccaacccagctacgatcatgactgatacaacaattgcagataaggtgtacattgaacctctgacagttgaatcgatttcacgaattattcgtcaagaatatcctgatgctattttgccaacacttggcggtcaagtgggcttaaacatggctatggaacttgccaaaacaggaattttggatgaattacacatcgagcttctaggtactaagctgcaatctattgaacaagccgaagaccgtgaaaaatttaaggaattatgtaagtcattaggtgaaccagttccaccttctaagacagttaatacagtcgaagatgccttagcttttggagatgagattggctatccgatcattgttcgtcctgcctttacaatgggtggtaccggtggtggtatctgtaataatcatgaagaattagcagagattgccaaaaatggattggaactttcccctgtaactgaatgtttgattgaaaaatcaattgcgggctataaagaagtagaatttgaagtaatgcgcgaccatgatgacaatgcaatgattgtctgctgcatggaaaactttgatccggtagggattcacactggtgattcaattgtcttttcaccaagtcaaactttatctgataaggaatatcagatgcttcgtgattgttcactgcgtttgattagggctttgaaaattgaagggggatgcaacgttcaacttgctcttgacccaaatagctttaattatgatgtaattgaagtaaatccgcgtgtttcaagatcatctgctttagcttctaaggcaactggttatccaattgctaagatggctgctaaaattgcagtaggaatgactttggatgaaattaagaacccagtaacgggaacaacctatgcagaatttgaacctgcattagactatgtagtctgcaagataccacgctggccatttgataagttccctaaggctgatcgcgttttgggcacccaaatgaaagcaaccggtgaagttatggcaattggccgtactgcagaagaagctatgcaaaaagcggtaagatcactagaaattgatgaaaaagatctttactcaccagaagcacacgtagctagtgatgaccaattagagcaaaaattagtcaaagctcaagatgatcgtctcttctatttagctgaggcatttagacgtggttattcagctgaagatgttcatgaattaacgaagattaatttctactttttagatatcgtgcaacatatggttgaattggaaaagacacttgaggaaaataaagatgatgttgatgtattgcgcttagctaagaaatatggctttagtgatccaacgattgcctctttgtggaatgaaactgcagatgaggtaagagcatttcggaaaaagcatggcatcatcccagtctacaagatggttgatacatgtgctgctgagtttgaatcaaagacaccatacttttattcaacttatgatgctgaaaatgaatcacataagactggtaagaagtcggtgatcgttattggctcaggtccaatcagaatcggtcaaggtgttgaattcgattatgcgactgttcactgtgtcaaggccttgcaaaagatgggctacgaagcaattgttatcaattctaatcctgaaactgtttcaactgacttctctatctcagataaattatactttgaaccattaactttggaagatgtcttgaatgtctgcgacttggaaaagccagaaggcgtgattgttcaatttggtggtcaaacctcaatcaatttggctcatggcttagaagaacatggcgtcaagattttaggcactaaagtagctgatgttaaccgtgcagaagaccgtgaactgtttgatcaaatcattaagcaacttcatttgaatcagcctcaaggtttaactgcaactactcatgaaggcgtacttgaagctgctgataagctaggctatccagttttagtccgtccaagttatgttttgggtggtaaggcgatggaaattgtctacaccaagggagagttagaagaatacttgcaagaccacgttgatattgcagcagaccacccaatcttggttgatgattatcttgatggtcgtgaatgtgatgttgatgcaattagtgatggtaaggaagttcttttgccaggaatcatggaacatattgagcatgccggtgtccactctggtgactcaatggctgtttatccaccacaaaccttctctgatgaagttaaagaaaagattactgatgtcactagaaagcttgctttgactttgaactgtgtcggcattatgaacattcaattcattgtcagagatggtgaagtttacgtaattgaagttaaccctcgggcaagtagaacagtgccatttttaagcaagatcacgggtattgaaatggctcaggtcgctacccgagtaattatgggcgaaagtttggctgaacagggctacggtgatggtcttgccccagagccagacatgatctctgttaaagcaccagtcttctccttcagcaaattatcggacgttgatgcatatctcgggccagaaatgaaatcgacaggtgaagtaatggggagtgatcacacttttgccaaagctctctacaaagcttttgcaggtgctaagatgcaattgcctgaaaatggtaatgtattacttaccatcgaagatcgagacaaagaaaagattttaccaattgccaagagatttgcgcggattggctacagaatctttgctactaagggtacagctgatttcttgcgcagtcataatttgcatgttgatccagtaactaaagtgcatgaagatgaagacgccaaggataatatcttgaatgaattaagaaatggcaagattgacttggttatcaatacgatgggtcacgatattgaaaagaattctgatggcttcatcattagacaggttgccattggtcaaaatgtaccattaattacagcacttgatactgcagatgctttgcttactagcttggagaatagatcatttgctactgatgctttgaagtaggatagttgaatagataaaaataatgcatttctctattgaagtaggagaatgcattattttttatgcaaaaaattattttcacaagtgagctaataattctgagataaataaacgatagatagcattcaatcaagatattgtgaaaaaaatatgtatcacaaactttattatagagccatgagtaagagtatttcactatctttcgtaagcgaatacatttataatctgagataaggaagtgaagtgtttaggggggaataaaaatgtggatttcgtttttattggctttaattccaattatttggcttatttactctttggcaattcgaaaaacgcctgctattaaagcatgcagcattggactattaattactatcgtattggctatactgggatttaacctctctatagttgacactttgacgggtgctttagagggcattctgatggggctatggccaattgtttatgtaatcgtggctgcactgtttacttataatgtaagcaattattcaggtggaattaaaattattcaagatactttgtcgtcaatcactactgatcagcgtattttagttttgattatcgcatggggatttggcggattcttagaagcaattgcaggttttgggacagcagttgcaattcccgctgggatattaattggatttggtcttaatccgattaatgccgccgtaatttgtttaattgctaatactacaccaactgcctttggtgcaattggattaccagtgattacactgagtgacgtaactaatttgcccgttactccattatcatttgttattactttacaacttgcattattaattattataattccgtttttattggtgattctaacaggtggcggagttaaagctatcaaaggagtgggattaattaccctgatgtctggtttgtcattttcaattccgcaaattttggtagcaaaatttgttggtccagagttaccagcaattgttggttcaatttgttgtattttgactacagttctgatggcaaaattatatcatcatcaagataatgacataaaagagaatattgagaagcacagcgctatcgaaattttgcgtgcaagttcaccatttattttagtgttcgtatttgtggttcttgcttcatcactgtttccagatattcagcatctattgggaaaagtgacttcttatattaaggtatatactgggaaagatacagaactgtttaagattaattggctttcttcaccaggaacattaattttgctagctacttttattggtggattaattcaaaaagttagtttcaagaaattaggacaaatcttaaaatcaacaatttttggattgtggaaaacattaattacaatttgttctattgtggctttagccaaggtaatgggctacgcaggaatgacttcagcaattgcggcagcattagtagttctaatgggaccaatatatccattagttgcaccgttaattgatgcttggggtacgtttattacaggatctgatacctcagctaatgttctttttggtaacctgcaattgtcttcagctaaggctttaggcgtaaatagtaattgggtagttggttcaaatatggtgggagcaactgctggaaagatgatctcacctcagagtatagctgttgcttcagctgcaattggacaagatggatctgaatcaataattttgaagcaagtggctaaatggtgcttattgtatttgggaataatttgtatattcctatatggaataggctttgccgtaggatttttataaaaataatttaaataactcttggtgttctgatatatattgatttgcacttgtcatccattaatagtaaatcgcttgcattaaaagcgctttcgttgatagaatgctttttgtaacttttttacattaataagggagacaaaacgaatgagttatttatttctgtttattccggcaataggatggggtcttatgcccatgtttgttgctggtgtcaagaagagtaacatttaccaccaaattttaggtaccgttattggtgcatttatctttggtgctgcagttactctcattaagcgtccatcttttaatgcgactacttttattttagcaatgttagctggtgctgcttgggttattggtcaagttggtcagtattacagttattccaaggttggggtttctgaaactatgccaatttcaactggtttgcagttgatcggagtgccacttgtaggtgtgttgatctttggtgaatgggcaagcactcaagctaaattgtttggatttttagggatcttagctttaattattggtgtagcatttacatcattgactgacaaaggtacatctgagggtggaaaaaagaatcagaccactacaatgattgtgctggtattgactacacttggttacattacttcaagttccattccaaaggccttgaagggtgacagcgtaatgattttctttgctgaaaccattggaatgttggttgcagcaattgtttatttaattgcaactaagcaaacacaagtctttaaggaaaaagaaagttatcaagtaattcctgccggtgtgatttacgcaattgctgctcttgcatacattgtttcagttaagatgaacggtgtaaacctagcctttgttatgtcacaactttgtgttgttatttctactcttggtggtatccttttcttacacgaaaagaagacacaaaaaggtcttatttatactgtgatcggtttaatattaattgttgccggtgcagttttgacctcagtattttaatgaattttaaataaatattgaatgaactccaacatgataattgttggagtttttgagtaaaaaagtcatgaataaatataaaatgaattaaaatataagtagaagccaaagagaggatgatttctatgagtgataatacagtatacgtgatcgacggtcgtcggtatgcacgtaatggagaaattgtcgaacataatgtgcatgtttatagttcttatcaaaatctgattgctgcatttaagccatttttggaagtttcaaataaagaagtgcatatgaatggcaaaaatgagatgcttcaggttagaatatatgatccatcaaatcaatttttgacaaaatataaatttgatatttatgaaaagaaaatagataatttctttccaagtactactgaacatatttagcaaaggaatgatccgatgacttttaacaaagaagaaaaagagcaagctttaaagcggctaactgatgaggaatataacgtaactcaaaaggctgctacagaatatccttttaccggaaaatatgatgatttttatgaaaaggggatttacgttgatgtagtgtcaggtgagccacttttttcaagcttagataagtataatgcaggctgtggttggcctagttttactaagccaattaagaaattaacttaccaccgcgatcaatcgcacggaatggagagaacagaagttaaaagtcccgaagctgattctcacttaggtcatgtttttactgacggcccagtggatcaaggtggtttacgttactgcattaattccgcagcattgagatttattccatatgatcagttggaacaggctggctatggtgaatataagaaaatatttgaataaaaaattatttctcatagaacttaatttcagtattggccaaatcaactgtataagtttcttcttcaagtggtcgtttagtcattccttcatcagttgagtagatgatcaaggccaacttactaccagatggaagagtgtagtaggtaggttgaagcaagaagtctaaatcgtagaacttgtcagcatcaatcttctcaggtcttttcatgtccttatagttttgtaagttcatgtgacccttagtgatcaacttagccttagtcttcttgtccggcacaaattcttgcaaagtatcagtgccaaatctatagccaagttcttgaccgccgcgcattaagaacttaggtgtagcggttaagcgtcttctttctcccaattcaactaaagcaacagaaatttgtcccttaggtaagctgcctttaactctaacttttacttcaggacgaccgacaatcgtagttgggtgaataaattcgtctgtttcaaaacgcaaacttggtttagcccatttttcatcaccacagatgaacttgtatagccagtcgctttctgagatgtcagccttcttaaattcaatgccaccttcatcgacaaatgattgttgtgcattgccattgccatcttggaaaagctcgccgtcatcagttgggtagtaggtcttcttttgacctaattcatttgaccaatccttttcttcgtgccacttgtcagcttgcaagttgtcctggatcatgacggttggccattgcttgtaagcattgttttcaatccctagtaattcatgtacaaaccaaaggttcattaagtcagtaaaatcaatagaaacaaagttgttcatattgtagtgaggaccttggtgtaggaaaagatgatgcttcattggcatttttttgactagttgccaaattttataaacattctttggcttaacgttccagtcatttaaaccgtgaacagaaatccaagaacatttgatgccgtcagcgtgatggcggtagtttcttgcttcccaaaagttggaatattgaccggtttcacggtcttcttttgttaaaagctctttttgcatcttgtcgtattccggtttgatcttcaagtaagaacctgcatcccacaagtttgattgacaagtttcagccagtaaatcaaggtcttcaccttggcaggcttcgggtgcgattaccaaaccgtgttcacggtaatagtcataccaagaagaaatagcagcttcagaaaccacagttttcaaacctttaaccccagtagtggcaatagcaatttgcaaagtgcctaaatatgaacgaccagtcatcccgatattgccattgcaccagtcagctttggtttgaacagatctagtacggtcagtgtaagcaatacgatcgccgtggagccattcgataactgcagcagctgattcagtttcttcaggtgcaccagtaatacgaaccccatcactaccacgggtaccgattgctccagcaaaaacactggcaaaaccacgagcaagcatatactcatttaatggataagaagatttatgtactgcttcttcggtagctgggtggttagagtcgtctggctgctttgctttaactattggtgcatgaacatattgtggatcattccaatcggcggcatcagataaattttcatcaacattatggttacgcttttcattagcgataattccgccgaaatatggtgaagcagtataaagggcaggcacttttaagcctttgttagtttcagctggtcggaaaacagtaacttgaatcaagtcactcttaccatcatgatcagtatcaagatcagtttcaacgtaaacaacttcacgaattactttgttggtatcgaagacaggaatagctttgccattgaaaaatttaaacttattttgtccccagaattgagtaaagtaccccttaccagccattacatcgagcaaaatttgaccgtttttggcgcgagtattgagcaaacgataaaaagcagagattaactttttgacatcagaaatgtcttggacaaaaggtaaagcattcttttgcataaagccagttggatcgactaattcgtagtcataatgaacatgatagccaagtaattgtaaggctacattatagaattgagcagtaccaattgattcaggctttccttttaaaaagtcagctaaagtttgctcatttgaaacagcaaattcagataattttgttgtcttagcagcgtcagtttttgcttcagcaattgtcattttaacgagcttgcccagcaaatcgttaaaattccagtctgcataatttttaggtaagaaattgatgtcgattaattcttttacttgttgatcgaagtcagtttcgacataagcgtattggttatatttcatatttttctcctttgcagtttaattactttctattttacttttaattgtggctataaccaatagatatggaagttaataagcgaaaaatatttttattttggtattcttttctttaaaatgaacttaaacaaatgggggatgctaaatgagaaaaaagttttcacttgtcttgctacttacaacgatatttacaatttcgctgacagcttgtactaatcagaataaggttgatcatactaaaagtcagactaaaatcacctcaacaccgacattatttttccacggtgtggttcgtcatatcatactgaagaacacatggtggcagcagctgagaaagctggagtcacgaactcagtgattagagctgaggtggcgcctaacggtaaggtttctttgagtggaagttggaaaaaaggtgccaaaaatccaattgcagaagtcaattatgaaaataaccgtgagttgaacttttctcgacatggtgtttacgccactaatgtagtgaaggctctgcaaaagcgttatggtattaaaaaatgaaccattctttaggaaatatttcgatcatttattatatgctgcaaaatggacgtaaccggaagatgccacaattagtcaagcaagtcggcatggcaggacattttgctggtttgaactttagccgtgttcccgcctcaattcgtcaacctaaaggtttaaaattgaattctgccggaaaaccgaacaaaatgaattctagctattggcaaatgacgggtgtaagagaaacatatccgaaaaataaagttcgtgttttaaacatcattggtgatattggtggtcaaaccgatggaacagtacccaatgtatcatctttgtcattaaagtatttagtggcagatcgtgctaaaagctatcaggtagtgaagtttactggaaaaaatgcacgtcactccaagttgcatgagaatccaaaagtagataaagtattaatcaaattcctgtggaataaataaagttagtaataggcatgcgaacgtatgtctattttttgtgccttttcttaatccaattacttgaattataaaataatgcgtgtataatattcatctaattaataaagaaagggcatggttttatgaagctattaaagactaaaatcttaacaattctgtgtggcttgctaacattgaacggcttagccatgttgttttcaggattgattatccaaatggacgaagttgctgattttgattcagcccaaagtttagcagttgctaattcgactaatgccattattttggcaggaattattatgattttgctttttggggcattgtttttcgatggttgggctaagctcaagaacaggcatgctaagcacgttaagttagtttaatagaatagataagactagctctgaagtgagctggtctttttttgcccaaaattaaagtcttctttaccgtttttttacttttgcatgtgataatgagccaaaattaatcagggggatagttatgggattctggtattattatgttttgccattagtgacggctattttattcgtttggctaggaaaccgagttatggtgactaaaaaatggattagcataattttttactcattagctggagtaggctatttaattgcatcggtttttgctgttttttatatctatgcaacagtagaagaaattttaacgccagatattttaacaaaaataggttggcattatttttggagtgataattttatttttcttcttaccagcactgttctattaacaattagctattttgtactaaaacgtggtagattacggatgaaataggatgctcaaaaatgataagattatttttggaaaaaatagaataatgatggggtgaaaaaatgactttaccatttaaggcagttgctgtagatatggacggcacgtttttagatgatcgtaagcagtttaatcacaaggaatttgatcaaattttgactgaattttacaaaaataagaatttaattagttacttttggctttatataagggagtataagcaataaatttgattttgaatcattaaaaaataaaattttacggaaaaagtacggaaaaattatttttttattctaaatccaagttgttaactgcatttttgatattgcttttttggttctgagtgacatgggtataaatgttaagtgctgttgttactctagagtgtcctaaaacgtattgtacatctttaggggttatcttgtcacttccttcgtaaagtagcgtagctaagctatggcgaaagccgtgagcggttatttttcttagttccgggtaaaagtggtaaatgcttttcatccattctgaaactgccggcgaattgaaaaagcttccgtttttcgtgtgaaaaatataatcatcatcacgattaaaaactttctgagtttttctatattcccttaaaacataatttaagttctttgataaggctaaatctctttttgccgaatacgttttaggatcaccaattacttttttattttgcaaatcgtgggatacagtgtgatctatatgtactatttgtttatcgaaatcaatatttttccacttcaaagctaatgcttcaccacgtcttagccctaaattccctagaactacaaaaaacgcatagtaggagtaattatgttctttagcggcacttaagaattccttcaattcatctaaattgtaataattttccttaggacgatcactttttttagatgattttttaggaataacaattttattaaaagggtcttcgttacaccaaccgcgcaaaattgcatacttaataattctgtgtagtatattgactttatactgataactaatgtatttttgagataaccaattaacaaacttttgtaagcgcgtgatatcaatacgatctatatatttgttaccaaactcaggtttaatgtgattttcccaatcacatttaatattgtataatgttgattccctaacattatcctttttaatcgaaaaccagatgtcgtagacttcttgaactgttttcttattggattcggctttacgattatttgcaacgctgatagcaccagcggcttttaattttatcttagcggcttctgcttccttgtaactgttaaacccctgcctagtaggcttgataggtttaccatcttctgggttaatgcccacgtaggttttaaagccatattttgtcttaccggacttcaacttgtaatcgtaaatttcaggatctttttttcttggcatgttctagtcctttctaaactaatgttctttcaatccgtataaattaacccgcccgctcgatagagtaggcgggtgttttttattttgcgtcactatttttgccagaatagacggaaaaagtagaaaccatatctttaccatcagccgcactaaagcttatccaataccattttttacgagcaggcgagtaaaggttataagatgaaccgttatctagtaacgcatcattgctattttccttgtcgttgccgtatttcaaattcttatcgttgaatagcttttctaagatgctttgacaagtgacagtactttgtatattcggctttaaaacgtatttgatagccgttactttgccgtcataagcaaagatatgaacttttttatcgtttttagctgtccaaaaagattcgcctttattagccaaattcttatttaatttttgacctggtaaattttggctttcagcattttcacggtcttcaaccgtctttttatattccttttgcatttctttatcactagctaagcggtgagacttgggcttgctggatctataagtagctgggtcagctagatttgcgacactgccaactactaagacaaccgcgattaggtacatccaccatcgcttatgcaaaggcttttttaatttttcggggtgttccttgccaattgttgaatttgcgttaactttgtcaatccaaaaggcaaaagggattaatcctaatccaattaccaaaaacataatgtaacctgccataattattcctccaataaagcatatttatgtatttcttcttgcacctgaaagtaatcagttgttccaagcgcatttgcaatactcaaccaatttgcgctgtcaagatcattacctaacgcaaagtactgtttgattttttcgtgaatccaaaaaacattagctccatgctcgctacatgagcgggcactatcatttgtttggtagtcgcctaaaacgtcaccatcattttttgcatgaccaatttcatgtagaatgacgttttccacttgatcgttgttgagcttagagttaactactattacatcaggttttccgtttttaccatgcactattaagccaggacaatgtaaaggggcaaattccagttttaatttatattttttaagtaacttactaacattggtatccataaataaacaccttatttttcgctgtaaatccttttcaatatacctctaaccaattctctgtcatgttcgtctaatggtttgccatcaaaagaacgtgcatcatctaacatgtcatctaaatcactagtagatgatgcggcattttgaacacttaaatctagtaaaacgtcagaagaaattccaagcgcttcacaaatctttttaatagttgcaatatctggttctgctatgccgtattcccaattagcataggtagatagcccaacaccaacgtacttcgctagttttgttttgctccatcccatccgctcacgctcgtatttgagcttactactaaaatcagtcattattaaacctcctattttcttgtacttatataagcaattataagttaaatacaaaaaaatagtacttttctactaaaaacttgtagaaaaatgttgcaattttaaatatttgtagtattataaaacgtgtaaggagttacaaattacttgtaacttttaaatgataaaaaaggggggtgaacagatgacacagtttacaaaatcgaattcttcagaaattctaaaaaagtatctggacagtcacggcatcaaaaataaatacctggctgaaaagatgggaattccgccatctactttaagctactacttaaacggccatggcaagtttactgttgattttgcttttgccgtaagtagtgctttaggaatttcaccagaaatttttttagacaaaagttacaagaaattggtaactaataaaagaggtgactaaaaatggaacttcttaatcaaactatgttgaaacaaatcatcgaaaagattgttcaagaagtagttagagaggaactgaaaaaacgtggcgaagtaattgatcaaaaaatgttcaaccgcaaagatgctgctaagtatttaggctttagcggcggcacacttgataaagctgttaagacgggaaaacttgacccaacttttccatttggcgatgacggcaataagtactatttgcgggaagacttagatcattttgcagaagaatccaagcgaaggtatttagaaaaggtgatttaaatgacagtaattacaaataagaaggtttacgaaatcgtcaaagaatttggcgtgtttgacgaaaacccggatcaattcaacattaccagcgatgaagattatagattttacctctggctagataacggttcactagtagcatttgaacctggctataaaggcttgcaagacttgctaagtgaagtgattgattactgtattgaaaacggcaagcaagttcaaaaggagaaagcaaaatgagcaaagaagaatacgaaagagagtacggcagaactaagttagatcacgttttaagtcatatgactaaagcgtttgggaagttcctagaattcttagcaattctatttttaccatttgcaatcgttgaacaggtttgcatttacggcacatcgcaccccgaccaaatcatttccctgctgttagttctattaattctctttacggctttaggcgtacgtgccgtaaagaagcttagaaagtaggtgagcatatgaataattcagcaattttcaaagttcgttataaagcgaacaagaaagaacaagaacttaacacaagagcaattagcggaagccgtagggcttggagttagaactattgggcggtatgagcaaggctctagttttcctaacaagcgagtacttcatgaacttgcgaaagttttaaaagttaagactgactggttatcagcaacgaattaaggagactaaaaagtgagacaagacggttatgacattttgcaaaaagcagttaaggaaattattcaaaacgaaaattcgtttgcaattcttcaaatccctcaggatacccttcgggtaccacagccggcaataaatgcggttgttggcgtacaaaccgaaacagcaactatggcgtcgctacctcaacaaatgattctagcgattcaattttacgagcgggtaaagaaagaagcagatgaaaacgggctatcgacggattttaaagctcttaaaaaaatgattaaagagcagttggaggactaatgaagctatggaatcaacttataaacaaactttttcaagtggacaaaagaatcaacttacagacttccaacgcagtgttcttgctaatagtaatgctatcagcactgctagtggggatttcgctagattgacaaaagaagttaaaaagtttcttggtttagcaaaacaaaaagccctctactgctagagacagtaaagggtgttaaacaaagaaaaaatatttcaataaggagattataccacaatggaaacgttaaatgcagaacaagtaaaagaagcaaagtacttgtacgaaaatcaagcactaaaagatctatcgctagaagagccagacgcaattcttttctgggatggcgaagagcaagcattaattacaaaaaatgctgacgactttgacaatgcttatgaaaagccaatggatttcttcatgaaaaaggtaaaccaagactataaaggtgatttgaatcagcttgcaaagtcactcggatatgggctaggtaaagcaagcttttcaatgggtgatttcttagccgattggtacgacctaaatgaagatacgctaagaggattgatcattgactactttgacggcgaagaactaggagatatttacgatgactaataatgaattaatccaatttgatggtattgagtacccagtaagctataaaccagctgaaattattttcccaaagtatgaagagatgaaaggcaacatcttaaaagttcacgatgaatttgctgattggacagtaacaccacaaaatcttaaatcctcaaaagaagtaagaaagaatctcaacaagcttaaaagaactatcaattcgcaaagaatctcgattactagtggcattcaaaagccagccaagatgtttaaagctaacattgatgacttgatagcaattattgacgaaacaacaaagaacatcgattcacagcttaaacattacgatgacaagctgagacaagataagcatgatcaacatgtcaaattcattaaacaggcttgtgaagatgctggtgtagatcctagcaagattagatataacgccagctgggacaacaaaacttatagcaaccctaaatttgaagctgaactgtatgagcaggttgatatcctgcgtaaaaataagcaacagctcgaaacaaataagcgaatcatcattcaaaaagccgataaactaggaattccgtttacccattacttcgagcaactgcaaagagaagtcccacttgatgaaattctcaacgacatgcaagcagaaaaagatgaactgattgaaattgctaaaaagcaaaaagaaactaagcaaaaagaacaagccgacttggttaagcatggcgataaggcgattgacccaaaaactggtgagattaaagaaaagacctacacagtaagacttgagcttgaaaaagttacgaaatatcagtgggatcaattgaaatgctttttaaaagattggggaattaaagcaaggagaattaaataatggctacaaaagaacaaggctttactgatttgattgaaccagatccaaaatcgataagaaaatttagtactgatgagttcaagataaaaaacaatgaacaacaactaaaaattgttgaccttacagataaacaacaagagcgaaaagacaaagcttcatgggctatgcatttagccatggttaaaatggctattgttcagcctaaaaagacacatgaagctgaagtaagtgggctaaataagtataagaaaccatatcattacacttacaaatacgctgatttagctgatgttgataacgcagtcgttaacgcaatcaagaaaactgctaaagaaaatgacggcaagccactcttaacctactactttgatattgataacggagcgcaaggtgtaaccgttgaaacgattatcgtcgatgcaacaactgggtatagtgagcgaactaacaaggtttggtttaagaatctcaacattggggatgcacaagccacagcaagtttaattagttatggcaagagatattcactttcagccgcgtttggtattgctagtgaagatgatgatgatgcacaaacgcagaaaatgaatcaatcacaaacagttgatacagatgctatcaagattatttttgacgattatgtcaacaatcactcaatcaaagctaagaactggattaaaggtgagcatgaccaggctactggtagttacattaagcagctacttggtgattatgagctaaaaaatcatcttgacaaggctaaaaataaggctattagccgccgtaaggagcaagtccaagaagctgttaaaaagattaagcctaaatcagaagatgatgtcattaaagatattgtagataagcccaaggcagatccgtttgccgataaaaaagaaaactctaagttaaccgaagagcaacagaacttatttgatgatgatttaggtgggatttaaaaatgagtgagtttaaaggtgcaaaagcatttttaatgattccgccctcaatatcaagggataaagaccttttgaagaagcctaaatcaattatcttgatgggcgaaattatttcaatgcttaatgttactggtgactttcatatgagtaacaagacaatagctgaaatacttgattgcactccacaagcagttgccaactatttaaatctattggagggaaaggggctaattgttagaaacaagattgctgttcccgccaataatcctaaaagtgaaaaatctcaaagaattctgggtagaacaatttctgctggccctgccctagtcaacgctagtttactagggtggtcaaacagtgttgataagggtagtaaatctgtgtttagtagggtagtaaacacagatttacataaatataacagtttaacagaacataataatagaacatctaattcttcttctgggaagaaagaagaagacccaataagagaacaaatttataagaagtttttcttaatagctcggaaaaacgacaagcttaaaggtaaagctactaatccgtcattagatgaaatcaagcaattaagaagtttactttaccaatgcaacattgaaactttaaaggcaattgaaggtaaatttgatgtcaagatgcaatggaacatgattaatgatccgtttgcttatttgctgaaaatgcttcgtgatggtgtagcaattgacaaaaactgggggtaaaaaatgagaaattatgatttttgatttaaaaattggttgcgtagtaactccacgccaattatctgatgtcttccaatacacctttatgagatggaagcttggtgttgactatattcccaatagtcgcctttatgcgattgatacgcggaataacggaaaaatccaagttacgggtgatcggaaaatcgtttacttgggacttggtacttggaaagtaaaggactaaaacaatgactcaaagaaattacaaagaaaaaaatgttcaagaaatgaacatggaagatttaatcaatacggtaagcgacgacttaaaaagctatgacaagcttaaaacgcttgaaggcgttaaaaaagaaatgtcggtcggtttgtttagcaataacttatctgaaagagggctaaaggcttatatcaggttgctagagcttgaattgcggttagcaactacaagggaaccgatctttcatgattcacgtggttttggcgattacctagccggcaaatatgcggaacctgatcacgaagaaatgcatttgatcagtttaagcaaccaaggacaaatcatttctgatgatttagtgggttcaggaacggtagagaattcagctatttcagtgcccctaatcgttaaaaccttatgccttaatggggccgctaacttcattgtggtacataatcatccaagcggttcaatgaagccctcaaaagctgatttaaagatgactgattcaattaaaaatttgtctgagctaattaaagtacgcatgttagaccattttatcgttggtaatggaaattacttttcatttgctgagcatggtttactaggagattaacatgaaattttatctaacaagtcaaaagtacgcaaacagcaaccctaatttaactgcttatgaaattgaccagattagtaaagcctacttagggaagcttagtaacgtttgcacagttgaggtttggctaccgtctaagatcaaaaagacaaaatatgcgggagatggtatctgccgcggcggatcaatcgttattaacattgcagatgtacccacttggcaattttttagaaaaatgttgggtaaagccttccttatggttgctttaatgcaaccagactatccaaaactagtaattaaagatttatagaaacaaggtaaaaacaaaaaatgaatacaaagtacaattttggcaattgtaagtttaaagcaagtaaatttagtgaattggataccaacccaagtcactacaagaacagtagctttacacataaccgccctagttctttgaacagctatacaaagggcgtagcaattacttacgtaaacggtcaaacctttaagactaaggatgtaactgtagaaagcatttaattgcgggcgaaagcttgatgaaaacaccaaatttacagttacggatggactgcaatatttttaggaggtttagaaatgaacgataaagaaaagaaactaacagaagcactaaaagagtattttggcagggatgttggcgatgttgagggtgagcctaacttcatggattattctacgaaattaccgggtttggtgcatcctataaagcgtatcgtgatcactacggtaccttacaaaccaacttttgaagaaagacgtaaagagttggttgaccagctagataaggatttgaaagaaattgatggcgactttaatgtgaaaattaaaggggataggatttacatttatctttgtgcagttcgcttatatgaattatatggcgaggataacatggctatttatagcgtttatttaaaagtggagaaaatggccaaggctatggaggctatttcaggcttttcatggaatttgaggcaactaaaggagcaataaaaaaatgactagtgaatcagtaacttacttaaaaaatatcttagctgtccaaaatattagcggtcttattacttctgagggctatgacttaatcgatcaagaaaagttagtaactaatcacaatcaggctaagattttagctcgattggttaaagaggtaggtactaataattacaacgccggttacgctgaggggagagctgaacaagcgtttgaagacggtaaaaaaatggctgagtttatgaaaggagcgtcacaaggtgaatgacttagtaatcatgaaaagccagaaggctttgacaactagcttgaaagtagctgctacttttagtaaagagcataaaaatgtgcttcaaagtattagaaatctcactgctgaaaattcagcagtgaaaaagatgtttgctgaaagcacttatgttaatgatcgggggcaagaacagccaatgtactacatgaaccgtgacgggttcaccttgcttgcaatgggctttaccggcagggatgcaatgaagttcaagcttgaatacattgaagcctttaatcgaatggacgaattaattagaaatgaagacaacttaccgcaaacgccggaagagcaattacaactaactatggtggttgctaatcgccttgttaagagaatgggcaaggttgaagcccgtgttgaccatattgagaaaacaagtgaattaagtgaagttcaacgctaccagctgcttcaagcaagaaaaaagaaggtaattgaagccattggcggtgtaaatagcaattattacaaagaaactaaggctagaaaagtatttaatgcgtttggtagagatttcaaaaaagagtttcaaattccaaggtatgacagtttagaaaagcaatactttgaaaaagctatggaatttactcacaattggtatcctgattttgtccttcaacgtgaaattcaaaattccaacgcacaaactagcttaaaaatttgataagaggtgaattgatgttagacattgaagtaggagaaacaatcacagacggctttaaaacttatgtgatgggacatgacttaaatttgcattttgtcagttatggcaaccatgcaactcatcacgtaagcgaggatgctttaaaaatcattttgaaaacgcaggagtaaaggatgcaacgagttagaagggtgagacgggaaccaggtcccgaacataggattcaaaacgcaattattgccaccttaaattggcggcgatgcgctgtcattaggctaaatgctggtgctattcctacaaggaatggtcatcttttcagggggttaagcctggaactcctgacttaatcgggtaccgtttaaaagataagcaagtattttttattgaagttaaggcgccaaaaggacgaattagtcaaatgcaacaaatgtaccatcttgatttaatgcataagcatgtaatccacggtatagctagatcggttgaggacgctgtaaagatcgtcaatgaaggcttaatcggctatggttatccagattacaaggaagtatgaagagaataggggaaacaatgtattttaaattaattatgctggtagttgctatatatgcttgtggcttaacagcttttagccttggtatagttctagcaagtaaaagaaaaacttggaatttaaagctagctcaatcatttggaattatctgtttgggcgttattagcaacctatttattctatggatgccgcattgtaactggcttaatgcgtttcttggaatagtatttataatcttgccagttctagtatgttggtcaatattggtattagttccagactcatgggaagcctggtaatggcgtttttaaagattaaagaagcttgtgctgctaaaaatattactttaaaggatttatctaagttaagtggtattagtgagagatcacttgaatggtacgtcaagcaacaaagagagccttcgttaagtagggctgagaaattagcaaaagtattagaagtttcaccagcgtggctggtttcatgggagtgaagattgtgagtttagcaggtctgaattttgataaagaaaaaacaattagcaacgcaaagaattttcttgaaaatgattttccagacattatgaattattcaggtctgccggtaacttacttatctagtccacttctcgaccctacgggtgttcacggcggcggtaatgtaaaccatcagcccgatcaatttttaaaagctatcgagcaacaagacaagtacgatgcaattgttaaggactgtgaaaatgctacccgtgctgtggttgaagctatgagcagttgtcctgataccgaacgggatccgtaccgcaaaattttggttagaagatacgttaaaaacgattttgcacaatggatttataacgatatgaattattctccaagaacgtacggacgtaaaagggacgaagcactttatatattcgctcaacacctagagcggtaccgcaagaagtacaatgctgaaaggctaattcccgtgttgatggtgcatggatgacctatttttgaccaataaacgccaatttttgacgcatttttgaccaacacttgaccattaaagcgggttatattagtagagtcgaaagattaggaaagagatctgatctttcgatgttgctcgttaatttaacttgttagtcaattattacgagtcattaataaactcttgtttttactataaatatgggttgtgcaaaaggtgcaaccctatctcctacaagcctagtgtaacggcaacacgccagtctccaaaactggttatgaaggttcgaatccttcggcttgtgtagtctgcgaagacgtgtaaatccaccgagcggtctgagcttattaaacattgttctagtcctgataagctcgaaggcaagtttgaagaggcttgccttttatgggcagataggtagtctgctcaccgttaagttgatacttgttattaatttagatttctcccagaatttaggtgagtagcataggttcaatacctgtggtgcccgttgagtaatctggtgcgtaaaataagcaacttatttcacaacacattcaattgaattggttacgaagtgcacccgtgttggttcgaatccaacattactcgttgtagtcagcgatgatgggctactagaatccaaaaaattcaggatcacgttaattgcagtagctgctaagctattgctttttgtttttaggggggaaaattatgaacaaaattttaacttttgccgctggtgtggttatcggtgtagtttacaaggacaccattttacaagtagcaaagcaagtagaagccgcaaaggatgctaagtttgataagaaacttgaagacaagctggcaaagcactttaaagatgtaggcgaacaagccaaggaagaactagataagaaagttcctggtgcgtttgacccaagtaatctggatgacctgtactaatgacacctacacggtactttgagttatgtcaaagacatagccgtttagttaaggcaagaaaaattgttaagtactgcaaaactaatacagttgctaacatcaagcagaagattctatttaagcaagaaacgggctttatgccgcaagattacttagatagatttggtaagaaaagttaggaaatgaaaaataacgaagaagcacctatgacagattcactttttattagaattgctaaagggaaaattgcagattaccttttagaagttggattaaatgctgatctttcaaaaagtgaattaatggcaaaaatccagatgacttggtacagctatatagctcgtaattataaggctatgttctgtatccatgattttaagggcaaagatgaagcaaaactttctaatcgctattttgaagtaacttatattactaaagatgatgagtttgtagctgatgaatatttgcagtttgttccaacaacggtaaaggaagtttaagggaatgcaaaaatgaatagaaagaaagtaacttacgtggtaactaaagataagaacggtaaggttattagtattaaatctgttcctgttccatcattattagatagagtgcaacgctcgtgtgaagaacgtttctcatcgtttttgttagcagttattgttgtgttcatatgtttaatgacgattatgttagtgcttaaaagtttaggaggctaaatcatgcaagtagaagctaaatcaattgatgaaattaagccctatgaaaataacccacgtgacaacgatgacgcggttgacgctgtagcaaattcaattaaagaatttggctggcaacagcctatcgttgtggacaatgagggagtaattatagcaggccacacacgcttacgttgaaaagaaaattgctgaaaaattaggcttggttagtgtaagcacaaggtctaataatatcggtgggaaagaatactccactaaaatgtttttagtagacagggatgtttacgaaaaggctggttacaatcacggtaaaaagcttaatattaacggcaagttagttcaagataagtatgtattttcattttaaggggtattaaaaatgtttgatgaaaaagaattcgatttattgcaaaaggtttgtgaattaggtacaaaaggcttagaactatccgaacaaagtttaaagaagcaaattgatttagttggtgatgatcttaaaagatcagctaataaaagctatcttagttctgacgatttagaaaacgctgctagaagattaaatgatttagcttcgcagattaagcaattaaagttaatgcaaaaccaagcagggaactttgaagcttataagaagcaacagcttaaaaaaataagaaagaaaaaagaattgacaaattaagaaagttgtttattgaactggttagtaaatcagttcttttattttgcctaaaaaggtggtgatttcagtttggcaaaagctacaaaagataagggtggtagacccgaagtaataacagaacaaaaattaaatcagtttcaaacgtttattattgctggctgtagtcttaaagaagcttgtgaacaaattgaaatctctacaaatacgtggcgtcgatatatgaagagacatccaagttatgtcgctaagtttgctaggtggaaaaaggaacttgaagcacgggcaaaattgaatattgccatgaagatcactaacgaaaaagataccgaagcaagtgtttattaccttgaacgacagactaagttaagagatcaagcggcaagaaccagtttaaatcgtgctaaagcccaacaaactcgtttgcaaaacaagttgttaaagaaacaacttgaacagattgataccactgcaagtaaggcaagaaatagcatgagcaagttagacatggataccttaaagcgtttagcaaatttagaccaaggagttgatatcagtggaattgactaatgaacaaaggcaaggtatagcgttagcggctagggaagaactagcacgcagaagctacgcctattattttttattggctaattctgatattaacgccaagctttatgattacatcgagtatatttgtggcaagcttcaagaaataattgatggtaagcagaaacatttgatactggaatttccaccacaacacggaaaaagtatgtgtgtgactgagactttcgccagctattacctgatgaaataccctgaaaatcaggtaatggtaacgtcatatggtgaagacatgtatacaaggtttgcccgtaaggaaagacagcattttactgattgggctaaccgactattcggcttaaccatcggtaaaaatagttctaacgattttactgttgcgggacaccgtggcgaagcgtatttcacttcaattcaaggtggtggtactggacgaccagccgacttgctaatcattgatgaccctatcaaagacgcaaaagaggcacaatcgcctacagtaagggaaaatatttggcaagaatggacttcaacattttcaacccgtctatctgctaacgcttctattatcgtaattatgactaggtggagcaccgacgatttagctggcagactactagacaaaatggactttgactgggaagaaattaagtttcctgctattgcttatgatttaccaagcggtcaaactgatgctataggcagacataatggcgaagccttaaacccagaaaagcacccgattaagcaattgttaacccagaagagtaatttaggtactcaaaaatttaatgctatgtatcaacaagcgccaacggttcaagagggtaacattattaagcgtgaatggattaagttctatgtccctgatcgtgagacgatggtacggcttcacttaacggagaaagaagtcaagattctgccacgacacttgcagcagactatccaagcatgggatgcaacatttaaatctaaagaaaatgacgactacgtagcaggtcaaacatggtcaagacgtgatgcagaggtgtttttacgtccaggctggtgccacaagcggttaagctttacacaaacgctagacgctattaagtaccaatcaaccatttacccggaatcaacatcaaagttggttgaagacaaggcaaacggtcccgcaattcttgatactttgaagaagaaaataccgggaattatgccagtatcgccaggtgccgacagcaaagaagcacgttttgcttctgtgtcaccgtattttgaagcaggtcaggtatacataccgcaccctaaatggaaacccgaatcagaagaattgattgaggaatggtgtgggttccctaacatgccgcacgatgaccaagttgactctgctacttatgcaattaagtacctaatgagaaacaagcggaaaatatcactcggctttatttagaaaggaggtcattaattgtttggttttggcaaaaagaaaaagccagcacaaattacaattggcgctgactttatggattatgaaagtaaaggcgtaacacccagcagattcggtgatacgtcttcttttatttcaacaaggtatttagatagaaaatacaactataaacaagctgaccatctgtttaagtctaatgctttagctaaccgaatcgcccgtttaccagctgaaacagcaactcgaaacggctggcggatagtgattaataacaacgacgaaaaacaagtagtctatcaaacagctttagatgcattattgcctaaagaaaagattgctagtgaaattatttatagaaatatcattggagatgcgtatttaaacgtcaatgttgatgaaaaacaccgaactagcttagaacagccgttagacccgcacaacattttaaaagtcaattcaatcaatgcttttagtcaaatgcatgtcaaagctaaccagatttgtaacgatccaacgctagaaaactttggcaaagaagaaaaactggtacttgaaggcttgtccgatggctcagatgataattcaaaagagcctgaaagtatcacaattgacagtagccgctatagacacatttcgctggacaagatggaagacgatgcaacgggtacatctttgctaatgcggtgctacgaccagattaaaacccttgatactggtttgtactcaaccggtaagatgctttacgagtacaacatgaaagtttggaaaaacgacgcctattttgatctgtctgaggatgaccggcgcaaaactgatcacagaatgagtcgcggtatgagcaccgaatcgttggtagttgttggacatgacgacgacctagaaaaagtttcaaataagccgggcggcattgattcactatttagttttgcttggcaacaacttagtaccgcaactgggattcctaaatcgattttgatgggtgaacaggctggcacattagccggtgcatcacaggacgtagtaaattactacgatagtatcggggctattcaagagcaggtaattaagccgcaacttgagtggctggttaagttgctgatgtggtccgaaaatgtgggcggcggttcagaagacccagactcattagattggcacatcgagttctatcctttgcggacactcaccgatagtgaaaagattgataaccttggtaagctttccacagcgttgtccacagcaattaatggtggctttcttactactgatgaagcccatgatattctgcttcaacaaactactaacgaagcaatcccaatccagttgactggcgatagtgccgataacgacattaccgaccaagacagaaaatcttttgccaaagaaaaggctaagattgaaaaacacctcacaggagcaaaaaaccatggcaagaagacgtaaaaaggtgccaaagacaagataccccatgaacttggaaaaatcgtatctgggggctttaaaacgtcttgtcttgtcatggaaaaagaaagcacaatggtatgccgattattatttgaagaattacatgctaggcggcgctttatcggttgattcaagtgatgatgatgaaaacgaccctcacaaaatagagcgactatccgctttaattgcattgatgatgctagctataaagaattctaatagtaaacaggaacttgaaaatgttgcaactcaatttgtactgtcagtaaatagtttttcttatagcaatgtcaatgcgcaagctagggcaatttcatcacaagcaattgaaagtaatccgactattcaagcgtttatcaaagccaaaattaaggaaaacacctcgtatatcacttcgatgcgggataagtatgtcgcacaattgcaaagcgacatttaccgcgcaattagtgatggtaagggtgccacggaattgaccaacgcaattgttaagcgcacgaatatgtcgtataaccatgctcggctaattgctaacgatcaaacaggcagtattttagccgaactcaataaatatcgcgccacacatgcgggctttgaaaaatatctatggcaatccatggaagacggtcgagttagaccaaaacaccaaatactagatcaacaggttttcagatacgatgatccagacggtggggacgatggacagcttccaggtgagccgattaattgccgttgtgttgcgatgccaataatagatgattagcactcttcatgggtgctttttttatgcagaaaggagccagaatatggcagatactaatacatcaacaagtacaccagcaggtagtacaaacaagcctttaacaggttcacttttaaatagtgctaccaagccgactagttcaccggttatgaagccagttgaaccggcaaaagaccctaaaggaatgtttgattggtctgatgctaagccttacgtgattggtaaagatgaaaatttgtttgatgtcgctcaaaagttctctgtagctttacagcaacttagatacttcaaccacatcaacaaggcaacgatgaaggttaaagaaggtcaaacaatttacattcctaacaaaccggttgaagttccttacggtgcataactatgggcgtaattaggtatgaaactactacgccaatcgataaatttactatcgatccaataacgggattcctgcacgtcaagaatgtgccaatcacatgtgaaggcgtgcgtctgtaccgtcaattcgatggacaacgaattcaagaagctaaaacgccggaggaattattctccgccgctacggttgactcagccaacaataaaccgattactgacggccacccaaccgatgcaaacggcaacacgatcatggttaaccgtgataattcccagcaatttatgaagggatttatgtctgatcacgcccgtgtcgataaagcaactaagacaatcagaaatgatttaaccataactgatagtaaattgatcaacaaaatcgggcacggcaagcaagaattatcaattggttttcagatgcagcttgatccaactaaaggcacgcttaacggtcaagcctacgatgctaagcaaaccaacatcagaatcaatcatgttgcaattgtggaccgtgggcgtgctggtcactcagtaaggctaaccgctgatagtgcggaagaaattcctgaagacgatgaaaagaaaggtgaaaagatggactttacaaaagtacataccaaacaaggtgatattagcgttgctgttgaagatgccgacaagttaacgaagcttgttggtgacgctgacgacagcaacagcaaattagaaaagcttattgcggagcgtgacaaacttaattcacaaattaaggagttacaaggctctggcgataagaacaaaaaggaagccgccgacgctaagaagaaggctgatgaagctaactcacgcgccgacagtgcagaagaagaaaacaagaaactcaagtcacaacttgcaggggatgcattcgaagacagaatcaacaagaccttagcattccgtgaaagagctaagaaagttgttggtgacagctatgactttgccggtaagagcgaacgtgaagtcgaagaagccgctcttaataaaaatttaggcgaacacgattattcagataaaagtgacgactttgtaagtggtctttatgaaggcctatttagtactaatgctggtggcgtaagttatggccgtactgctggcgattcgaacgaaaagactgccgtagagaaagcacttgaagcacgtcaaaacttatacgaaggaggtaacgaataatgccattaccagttggacaactttatcaaaagaaagaattaggtaacggaactatcggttctttaaaagattattcaatttataccgttaccgctgctactaatatcgattatggtgttgcccttgatattcaagacaatcaagccgtagtagcaactaaggcacctatctatgcaatttcggttaagcgcgcttacgtaattggtcatagttacgatgacatcgaaaatgaccactggcttaaaggtgaaaagattggcgctttacgccgtggtagcgtgtcagttccaattactgaagacgttgaccgcttagatcaagcaactattaatgctgatggtacttttagaccagctaagccaggtgagcccgttgttggtcgctttatcactgcaggcgatgctaatggtaccgcaatcgtagatgtcaacttaactgacatgggtactactggcacaggcgccacggtagacaagccatcaacaccaacaactgatccaagtactactaatcaatcagccggcacatcatcaactaccggtaccgataagaagggggataaataatgccaaaagcaggatttaatacgggaactgcctatagtgaacttttcaacgttgttgatccggttgttttacaaccaaaacgagaagaacttcaaggcagaacaatgttcaagctaaaacagcttcccgatccatgggcacttacttacgaatgggcatggaaagaaattatgggtcaagcgtcagactacaccgaccgtgcaacagacatcactaccactgatgtaacttaccacagggaagtaggctacattgcggaaaaagcggctggattcgaatattcacaagctgatttagagcgttcacacaccggcggtagaaatattgatattattaccgaccgtgcaactgctacccatgacgcattagcaaactgggaagacgctttaattttcaacggtaacggcgattcacaaagacctatctacggtttaactactgatgctgagaccgcaggttatcaaactttagatgatccaagcgtaaccttgcaaaaggtagtagaccctaacaacaaggacgcatttagtgatgcttacaagattatcaattacttcatggatgccgcttcaaagattactttgttgcctggctaccacaacgttaagccttacttagctttgccaccaaaggagtacgaattattaacccgtccgttggttaaccaatacaatccagacaagactttatggaacatgatccaacgtaacggagctaacagcgatggtgtttttgctggaattaaaccagttaccgagcttgaagcaaagtattggaacgacaaaaagggacaagcaggtaaaaagaatatgggtattgtttaccttgatactcctgatgttgcacaaattgttattgcaatggaaccacgccgttacggcacagccattccatccgctgacaacggattaagctacaaacaaatgtacatggaacgttcaggcggcttgtcagttaagttcccagccgcaattgttcagttaaccggcttgaatgatggttctgaaacatgggcagaagctaagacaaaggctgagtagtatgaatgacacaactaccacagtagagttaattaaaaagcttgatactgcgggcatgaccgatgatgtacctgatgactcactagaagcgttaattgaaaacgcccgaatgatcgctatttctgatggattccctaaagtgaaaaagcttcacggtgcagaaatgccagcccttgatttggctacccgtgctatgactttgcatcttttagcaacgcaagacggcgcaggtagcgggatggtttccgaaaaagttgacgttttggaaagccgttatgccgacacaagccgtttaaagtggctacaacgctctccatgggggcaactctatttgagattgtacaagaattacgtcggtaaccccgtaaaaattaggatcattgaacactaatgaaaattgaaggttataaccgcattccagaagtaaccaaggagcttgaataccttaaaactcatcaagtcgtaattggtttctttggaagacgtgaaagcaggttactaacaatcgtgggagctaacgaattcggagccacaattaagcctaaaaatggtgaatggctatggattcctactaaggattgccctaagggaaaaggtccaaaagacattgaaggcttgtttattcctaaagggcaccgtgtagcgtgcgtgaacgaccacggtaagttagtagcatatttctatcttagtaaacttgtacaaataccagcccgtccgtttattcggcaggcttatttagctaacaaaagaaaatatacgcaattagtaagacaatacattgccgacattctagcaggggtggcgactggcaaacagttgctaaatcgtttaggtgttgcatgtactgccgatattgctatgtcatcaattaagttgaagcacccaaaaaaccgaccagcgactatcgagcgtaaaggctcagacaatccgttggtcgatacgggtgagcttcaaagacaagtaaagttcatgatagtttcgatttagaaaggggggtttgatctaatgcacaaaatgaatccggcaagaatgattcacaagtacggtgtagacattaaagtttggagttcggggcaattctataaaccccgctatcctggcacgtcaactgatgaccctgattattcccaattaagcgatgatgatgctgaaaagcttcatgagccagttttgccaatgtcaagtcaccttgctcaactcttcgcccagttagatggcggcggagaagtgcagggcgatttgctttggctatcaattaataaatatccaattgaaagtgtggtcaacgttcaaacacaaggcggctattacaaagttaccagccgttcctcttatgagggatatacgaatccacacttttttgaatatcagctgaaaggagtaaatcaggatgacacaagcccaaatgccgccaatggtggacaactacctagtgatataccaacttatccaggtagttaaccaaaaatatcattgcggcgtatatccgcaaatgaatgctggcttgcgtagcaattacccgtttattacttatgactgggtagaccctggaagtgacgttactttagacgaaactgatgtcatggaagtaagacttcaaattgatgtgcaagcaaccgacatgtatgaagctttgaatacggccaatgatttacgcaagacattagcgcacagttacggatatagaggattttttaaacaagcacatgtgattccacataacgtatcaggaacaagctctcgaaatttctataatggcacgcaattacccgtttatagatttggtttcgattgctcgttttctatttaccgtgctggaactatctataaaccggaagaccttaactttgaatttaatgaaacaacgattgaatcaattaaggctatgaatcaaatgacaggaaaagaaataaacgtaagaaaggaagaactttaatgccaacattaaccacggtcgccccttacgaccgccctatggatgtgaacgtcattatgactgtcctacatccccaaccaattaaggggctaggtaatattttgctgttaaatgctactactgcagctgctaacggtgattcagctggcaaagataataaggatgccgcacaaaagacaccagctcaaactttgccagatactttgtcaaacaccgaccgcttgaatggtttgcttttacgtaagactgacccagctactggggcaatttaccgtgaatataagaaccttgatgcggtggcagttgactacaaagaagattcggctgtttacaaaaaggctacagcctactttgctcagccaaagcactcagaccgcttagccgtcttagattatgacaagtcaaaggcttacgatagtttgaaggctttctggtacttcaactggacttttggcgtatgtgtagacaacacaattgacgattcaaccgttcaattgtcaaacatctttgaagtaaacaaagatcacttcttagttctccaaactgaagatttgtccaagtttacccaaatgatggggcaaaactacactatcggcttgaagcacgatttgaatgagccaatggacgccgcttttgtcggtggcattgctcttaacgatgttggctcaattacttggaagtttaagcaacttgaaggcattacgcctgaaaacttaactagtcaagaattggctggtattaacaatattcatgctattgcctatgaagaaatgatgggcaaaggtcaaacctcagagggaactaccttatcaggtgaatatattgacttgcttcacggtgtgatgtgggttcaaaccgaatgtcaaagccgcttgcagaagcttttgcaagataacggcaagattccatatgaagctcaaggcattgccatgattcgtgcagtcttaacacaagttttgaatgaagcgtacgacaagggcatcatcatgactgacgacactactggtcgcccaatgttcagcgttactaccactccacgtagtcagcaatcacgccaacacttgtcagacagattctatgacggcgctagctttgaataccatgcttcaagcgctattcatactattaccgttaatggcgttgtcgattcagacactatcatggctgcttaattagaaaggggagtttaaatgccttcaaagattaaaacatctaaaatgcgtgaatatgatgccaatgactgcaccattatgatcaatgacaaattgatgtatggattttcagaaaacagcatgtttacggttactgataaaactgatgcaaatacgtacaagattgatccacaaggatcagctactaaatcgcacaataacaagactatggcgggctttacattgccattagatgaaacatctccttgcaatgcctatcttttagacttgtttaacaaggatgaatttttcacagttgacatcattgacacaacatcacacatttcttgtcattatgcatcaattgacaagattccagataagcaaggcggcgcacaagctggtgaccgtaattggcctattacaatgcttaacaaggaagaaacttcgaacatgacctatagcgattaattcgaaggtttcaagagactttcatgaaatcaaattaacttaaaggagacttaataatgagtgaagaaatcaataacgcaaagcttgccgaaaaggcgcacgaagaacaaatgaagattaaggaagaagcggaatcaagcaaggtcacacctttgactgctctttctaaaaccgtaaccattcgtgaagatactgatcaagaatatcaattaaagcttcaattccctggagttgaagaagcaactgaaattctggaaaattcccgtaacccgtttggcgcaattaatcgtccggaattgctgagagaaagcttgaagcacgtgattatccaaccaaagattaagtcaattaagtggtggaacgatcatgaaggtctttatgaagccgccgaagctgttttgaattttcttactgaaaaactctagacagaaactaggtaatagagaaattgaaagacaagccgattatgttgaacttcctctgcgtttgataatgcatgggattcctgaacggcttgtaaaaaatgctacaccggatcaattgctgatcatggctaaagtagtggaacgagatatagaaacaacaagtattagtcaagcaaatcatatcggtgaattgtttggcggcggtgataaatagaggtgatgcctgtcaattaaattgatgggtttttattttgcctgaattttaaagaaaggagctgaaaacgtggctgatatagagcatttagggattggaattaatacaaacgttgaatataactctctaaaagaagctgaaaaaacaactagaaagtttatttctgacctcggtgttttagaaaaacgctttgatcgtttaaaggctcctgactttactgaacaattcaacagaaacaaaaattccgttgaggagacaagtcgtacagttgctggcttaaaaaagcaacttggtggtatggctaccgaaagtggtcaaacaacagctaccgttaaaaagcatttagaagaaacaaagaattcaactaatcggctaattgatgcaaatgtaaaattaaagtcttcgattgctggcgtcggtggttccgctaaaactatgggcggtttatctaacaccatttggaaggctggcgtttctgcaaacaccgcttcaggtggcttcaatacggcaaaagatgctgttgagaagacaaatgggacgctaaaaaacaacagatcagccagcgaccgtgcaactacgggctttaatttgcttcatgatgcgggttcaaaattaattaccgttggaacaggcattgcggcggcaatggtcccagttgcggcggcttttaagaatgcaaatgatgaagccactaagctagctgatgaatacaacgtaattaagaacttgcagcaaactggtggagatagtgccgctactgctaagaaaaatacggcggctattcaaagggaaaaccgcaatctatctttaaagtacggcgtcgatcagaattcacttgctcaaggttcggaagaattaattaggcgtggttattctggtaatcaagacttagcggcgcacaagtactttgtccaagcggcaaaagcaacaaaagaagattataactccgttgttaatgccgccgctcctatgcttgaacagttcgggtataagaagcgagccggtaacagtactaaaaagatggcacgctacacaagggaagtcttaaacaaggcggcctatgtaggtgacgtgacatctggtcaagttggcggtgaaggtggttttggtaattcctttaagatggctggttcaatcctccaccaaacaggacaatcactttcatcatcacttgcagctcttggtactttatccaacttcggtgaagaaggtacctcggctggtactggtttacgtcaaattgtttcaagtttagttggcgcttctaaaagcaaaaccaagactgcggcattaagagatttaggattatcacccgctgatttctttactaagtcgggtaatctaaagcaactacctacggtcttcaatatgcttaaccgagcaacgcaaggcaaaaagtctaatcgtgttaccggcgactttaaacaattatttggtcaaactggctttaacgacgctttaattttgactagaaataatcgtgacgttgctaataatgtgagagcggcaaacagggcagacagtacaaactacatttcaaacttgtctaataaaaatatgtcatctttgcagaatcaattatctaagacaaagatgttgctaaaagatatggggatgcagtttgcccaacaaatagccccggtattagccaatatgctcaaatttgttaataaggtattaagagctattgaaggatggcctgcgcctgttaaaaagacgctgggctatattaccgcaattactggagcgctaagtactggttttattgccaaaagattagttggcaatgtgcttagaatcggcggcaaaactgtagccaaaacagcggcaaagggcgctggtgaatcggctagcccgtctcttttaggcggaacaggttcacttattggcaaagttagctccaatttgattggcggcaaatttgcaaaaactggattaggtcaaaaaactgcaggtcttttaggcggtacggcaagtaaaggagcttccgcccttgctgttggcggtatcgcccttaactccggtattgatctttataaagcaattaccacaaagaaccctaaaaagaagtttgaaaattacggtaaatctataggttccgcaatcggtggcggtgtcggactatatctcggtggtccagctggtgcggctattggctctactttagggcaagtagccggcaaatgggctggcgacatggctcgcagatttagtaagactaagtttggtaaatctgtcggtaaaaccttcaagcaagccgcatggtcgattaaaactacatggcatgatgctgggataagtaagatgatcagtggcactgtcaaaagtgtaaaaagatcgtttggcagtatgacccgtgatattgggcgggattggcgcgatcttaaccgtaacaaagcttttaggaatttcaagaacttcttaaagtcaggattgatgtcttctttaaagcttgctattaaacaaggcgcaacagtcattaaaactggtattggtgttgttcgtggggctgtaaagattgtaacgtctaacatcaagggcattgtcaaaatatcgtctggcgttgtcagaacaatatctgatattttccactggaaatggggcaaagcttggaaagatatgaagggcgttgcaaaatcagctattgacatggttactggaatgctatccggtcttaaagacatgtttagctcagttattggcggtattgcaagtagtgtcaaaaatgtttgggattttgtgtcaggtaaagactggaagacaaagaaacctgaaaatagcaccagtgttgcaagtgctaacaaatccgttaaagccatgcaaaacggacaaggtggtaaacatcacgccagcaagtcacatgctactactattgctgacattaaccgctcgactcacttaggcgctcatgctaacggtactgcttcattagttggtgaagcggggcccgaattagcttacaagccttattccaaccatgctcgtttgcttggcgctaaaggtccgcaattggcaaatatccagtcaggtgaaaaaattctcaacgctcgcgacaccgcaaaggttatgagtggcggtctcggtgctggattaaagctcaagggatatgctaacggcaacgctagccttggtaaaactaccaagaaagttactgatgactacaagcagattgcttctaagtcgtccaagtcacttaatgatcttactaagaagagcaattcaagctggcgcaagattacaagcactaccacaaaacaagcccagaagagccgaaaaggggcaatagacgaatacacccacatgcggacaggagttcataagcaaatggacaagatgcatgacggtgtagttgatcttgcttctacgactgcaaagggctttggtaaagagctaggtcacatgaccaagtacgctcattctgcaatgggcgacacaattgaccaggttaattctggtattaagggaattgatcaagttcttggacagtttggtggtaacacgtcagtcatcaagccagttaagttcgctaaaggttcaaatgggcgtttgtcccaaaacaccatggcaatggtcaatgatgcgacaattggaccaagacaggaagcaattatcaaaaatagcggtgatatttggattccaagagggaataacaggatattgccacttgaaaaaggtgattctgtcctcaatggttctcaaacacaagaattggcaaattattggggattacagcgttttgcgaaaggctctggcgtaagtcatagcagactaagaaaaatcgctgagacagctggaaataatcctgctaagagttttgctgatatgtacacttcaaaaattaaggcaagtggtacagatttacgacaaggctctattaatttagctagaaattcatcaactaagttaggtaatccatggtctaacgcaatgtgggccgtcattaacaacgcaattggcggagctaatggcaagggcggaacccgtgaaggatttttaaagtacgctgaatcaacattcagtggcgttaagtaccaaatgggtgcggcaagcaagacactatccgactgttcgggtatggtaatgcaagctttacgtcactttggcgtagatattggacgtaccaccgtggcaatgcaacacagttcaggtgttgagtacttgggtaagtcattatctaaaacaattccaggcgacttggttatctttggccatggaacaggtgccgctggtcacgtgggaattattaagaacccacacaccggaacaatgttcaacgaaacgccaccccatgcacgcgttacctcaattgctgatgacaaaggcatgggatacggatattaccgtgttcgtggcttgcataatgccgctcaatctaagaagacagcagcggctgataagaacttaatggctcttgcaaagaaagagctaggcagtaccgccttgggttggattaaaaagaatcttagcgatgatcttggctcacttggttcatttagtatcggcggcgacttagccgaaagggctaaagccctagccggcggattaaaaaagcttgatcctaaagcaaccaagaacggtattgcggctgttctgggtaattggaattttgagtcaggtggtttaaaccccggtgcagttaataatagcggtggtgcttccggtttaggtcaatggcttggcggtcgtaagtctaacttaattgcttatgctagacgtcacggcgcaagctggaaaaacgccggcacgcaattaagttttgccgttaaaggcgaaggctcagacagtgctattcttcgctccgttttggaaggaactggtagcgttgccagcctagcaaacaagttttcgtctgaatgggaacgcggtggctacaatgcccagcacgtcaaaggtgccatggagatccgcaaagttcttggatatgctaaaggcggcgatcctgtcgttggcaataaggttctagttggcgaacatggaccagaattagctgaattcaaagatccggttcacatctactcaaatgaaaagacgcggcaaagattaaagccactaacttcatctaagccaaaagtacgcccagtaagaggaactggcggggctttaggtggcattcaagtaaccgtaaatattaacggcaacgttgatggcgatgatgctaaattgcaaaaattagcgaagatgataggcgtagaggtagatcaacaagtacgccaaaagttaaatattattcttgatcatattggcaatgatacgggtgatgatgacgatttcttatagaaatgaaggtgatgctaatggttcaagcaactaagccaaaaaagagaacagctgaacaaaaagcccatgactctatgaaatactgggacaagcggcaaaaacatgaaggcgccgtttaccgaaaaatgttttcaaaggcgcagggctatgacttcgattcacattttgaaaagaatcaaattaaaaagaaaaagcttatccgaaaacgtgataattgtttgaagcttgttgatgccgcaaacaaaaggaaaaagcaagcggaaaacaattataaaaaagcgaaagacaagtacgaccgtattgttacgcaaagaattgatttaagtaacaaattggcggaaattgcggaacacaacaccggctggaagaatgaaggtaaatgtgctatttaccgttcggatggcaaaggtgaaattatttatatttcgccggcagacggtgaaagtgaaaatgtttcttcaaacattacttcttatccggttgatgagggcgcaccatatagctcatatgctcgtgtaaatagtaaaggcgcaacagttgcaggcatcattgttggtaaagataaagccgattcataccgtaaatggcacatgcttagtcaatggaatagttcgcatgttcggttaacctatcgaggggacttctgctataagcattacttaatcgcaaatatgaacaacgactataagaattttcgagataacattgaagtttcacttacttttcaatttgtctatcaagcaaaaatcaccacttcaaacgatagtaagcaccacagaaagtcgtctaaggcttctaaatccgtcgcaggtaatcgaaataaaaagtacactgctatcactattaaatctggcgataccttgtgggctttgtctaagaaatacggcagttctgttcaatggatggcacgagtcaaccacattaagaatcctaacttaatctaccctggcaataaaatacgggttgcgtaggcggtgatttagatgagaaattatcttgatgttgatgttaaaaatattccttatatctttcaaataacccttgtgggcgatacctacgatatgagagtagattacaacgaagttgcggattactacacaattacaatttggcataacaataagaggcttctaacgcaggagcctcttttgcttggtcaattagttggcattgatattcctgatcccgaattgccaagaattgacatttgcacgatggacgaaacgggtaaggcaacagaccaaggcaagggaacatttggatatgaggtccgcttgtatcttgacgttgttgacccgaatggatcagaaacagaagacccatcaattaaaccgctaggttatgaccctaacgaaaatgatgacgacctaacggatgaggaggtgtcttactaatgatcgttactaaagatccgcatatggaatttgtggcggttgatagtaaaggacacaagcaaatcgtatataacgatgaaacttacggacataattatccttttacgtttgaagtcccgtttactaatgatcctgtcccgtctacttttacaacaactattttcaatttaaccaagcaacataaagatttttataaaaaagggatgcactgctggataaattttaactggggtaaagaccctaaaaaaatagctgaaggatttatctctaatacgggcaaattaagcaatgatgggacaactgatagtaaagttttaacttttactgaaggcacaaactacagcaatgtagctgctcgaaagttgaagctaaaaaagaataaaaaggttaatcactacaaaaccgttaaaatcactgaaaaaggtcattacaagaatcagcgttatagtacctcggtcgttgaaacttacaagagaggtcctaaaaaagggcagaaacatgtagtccaccattgggcttatcgaaaagtatgggttaaaccaaaaactacaaataaaagggttaaaagccgtgataataagacttattttgctaaccgagtttatcgaaaaggaacgacttataagcaagtaattgaaggaatagcggaacaatccggtatcaaaatagctaaaatcgatttagctaaaaatgaaggaataaaaaaatcctttaccgctaaaggtaagccgctaactttaattaaaaactttgttaagttggctaagtccgaaatgttttacgaacgtggcaagctcgtaattgtcaatcctaatagcaagaaaaatacttggtttgtgattgatgataaagacttaattcaagttccatcgcaaaacgatgatgataaaaacgggacaacttggcaaattgttacgcccttagtcccagaaattaccgttaataccggtattatcatgaattctaagttcttaaaaggaaaatttgtcgttaaaaatggacagcatagttttgatggcaaaagtccacaaactcaatgcactattgcggcggttacaaaagctaaggctggtcataaaacaaaatctaaaagtaaaggcaagaaaaaaggtaagtctaaaaaataaggagatgacgacatgaagcaaaaaaatagaattccaattcggtggtatggcaatatcaaaaaagtagaaaaccggttcaatagaaatatggaatcggcttttttagctaaagttttaacttatgaccaaaagaaacacgttgcagatattcagccgctagcgaattggatcgatggcactaaatcggctcagtacttagatgttccggttgctgaatcttgttataagcttgatgaacagctagataaatttaagccggattttaaagccattgatagtagcccggaagttaactcacattttttagaacattatccgaaaaagaaatctatgagagttggcgccgtagtgatagccgttactatggatcgtgacattgataactgggacggcacggggaatacctttacgccaaataccagcagaatgcatgatgcaaacgactcaattatcgtttctgtttataagggtgacgacgatggctagagatttatttatgagtgataatcatgatctagtcattgacccgattacccacgatttagaaatgaccagtggtcttgacgaaatagcacaaagaattaaagcaacgctagaaattcgatacggtgaaatgcaacggctagaccccgaaatgggggcagactatagcagctttttaggtaaaaacttcaataaacaagcggcggagaatgatatgcgagcggctattgaagcaaatgttccggaagttgaaaccgttgataatatcgaatttatcaagaagcctgaaagaaaaatgcagattaattttagagccaccgcaaatattggtgaagtagagggggggttacaagttgacaactgattttggtttaaaagaaacaggctatattgccccaagtttcgcagaaatcttagacggtgtggaagacgattttcgaacgcggcttggagatgacattgcgttaacaagtaatgcctatctaggtatttttgcccgtttaatgagtgatgctgcttacgatttaattcagcaacaggaacaaatttactattctggattctattcaaccgctataaattcagcattagaccgattagcgggcaatatcagtttgacccgtaaagttgacgctccatctcatgcggaagttgtgataacgaccgaaggcgagtatttaattcaggctggcgaaaagttcgaaacagaagatggcttggtgtttgatttaaccgaggatgtcatcacttcaaagcaagatgatggtacttttcaaggaactggaaatgttgaatgtgaagaaactggtgaatttactaatgtaccagccaacacaattactttgtttgccaacccagatgaagactttatttccgtaaccaatccacgacctgcaggcggtgggcaagattatgaagacgatgaaacctttagaaaacgtttaattatggaaaatgccgcccgtcctggtcctacagaaccaggtattaaatcggcgttaatgaatttaaacggtgttaagcaagttggcttcgttgacaacgacaagtataagacggatgaatacggtaatcccgaatgttcagttcacatttatgttttaggtggtaacgatgatgaaattgctaaaaccttaattgataaatgcgcggctggtatcactttagcgggttcaattgttaaagaagctccggacgctacgggaaaattaaaagaagtcaaatttgaccacgctcaacaacataacatttatgtaaaggtcgatgtatcaattaatgacgactggaacagtgatgcgggggttgacgacattaagcaagcaatttgcgatgaaatcaactcacttgaaatgggtcaaagagttaattttacccgcctttattccgttacttatgatgtcaacggcgttgatgatgcaacaattgcaatcggtagcataaaagataagttagcggaccaaaatatttctattggtcgttcagaatttgctcattgtgaccctggagatgtggaggttgatttaattggcttatgagacaacagaccgactgatcgcggaagtagccgaccactggaataagaaaaaagataccgttttttatcaattgttagacagttacaattcactgcttgaaaaaatcagtgatgaaaatgaaaaaattgcggagtggcgtagcattgacaaagcaaaaggcacaacccttgatttaatcgggcaagattacaaagcttatagaattagtgatgatgatgaaactttccgttttatcatttttttacacattttaatctctagggcacagggaacaattccctcaatggttaaaattctgggcactgccttaaatgcaaagccggaacaattcaaggtatataaaaccggtcttcgacatgttggtatcgaaataccgtgggacaatgtgcaaacacttcaaatgcaaaaattcatcataaagaatattcaaaacctgctcgcgatgggctactggattgatgagatcgtgtttgtaactactacaaagttgccgctttacgtgggtatgggtacgcaaatcaaacatcgcaaaatcgagcgatcgcccgttaagtggtggactggctggaaggctaggacaagcgacaagcaatatattgggatagctacacagttcaagcatcacaatactttgtcatcaaataccaaatggtggaccggctggaaagctgaaagcactagaagccaattcattggtgttgttggtcaactggctaagtcatcggtatgggcgacaacagcagtgtggagcaagccacaaacagcagaaattcacgctggcttaactattgggaacaaaacattaactacaactactcaatcgattgcgactgagtagttttttaatacaaagaaaggagcaagaaatggcagaagatcctaatacgggctttaaagagaaattgaagcaaacgatcttgaccgatgccgggcgacatatcttcttatcggttggtaacggcgtaggcacattggtttatacacgcgctatcctatcaagtcaaaaacccgttaatagttccggacaagccttagatgatgaagcaattcgtcaaatcactagtttgccggacgatctcaaagaagggcaattaaccttaacgccagttacagatgatcactttgatgtaattgctgactttaacaacaagaatcaaccggcagacatcaattttagttgtattggttggtatgcaagagttgactcaaccaatgaacagaatcaaaaggtacaaggcgatgaagctttaatcgctatcacttttactactaacgatcacgagaccttagcggcaggtagcccagacggtttatctactgatgttatctctgcacaattgtctatgacaatcgcagaagccgctaatatcgatatgactgttaatgaagtgggatacgttactcgtgccgagcttaatgcatggcaaactaaagtaacggctgattttaacggcaagatcgaggacaacgagaagaacacgactatcaccttacgaggtaaagaaccggtcaaggcggatggcaaccatacctttaacctaaacacctacactaaagaagaaattgatcaaatggtcgctggtgctggtaaaggtgcagggattaatactgttcaaggcgtggcacccgacaacacgggtaacgtcaacctgggtacggtcttttatttaaagagtgaagttgatcaaaagtttcaagcccaacagaacacaattaacgaccttaaccgcaaaaatggtgctaaggacacacaaattgagagcttgaacaaccagctgaccggtgccaataaccaaatcaatgacttggtgaaccgagttaagaaactagaagaaggacaagcatggctgaaccagaacgctgtaatcggcaagagattcccagctggtcaagaagcacaagcccaacaatgggaaaacaacaatccaaacggtattgcgatgattgaaaaatagatagatagaaagaggtgaaagcatgttagatcatctaatttttaatgtaaaaaagtggtttgaaatttcaaacgatatgtccgctattacagctaataataaaaactattatgcttgtccatcaagatttactgtcatggcagaaacaccgatcaaaaacccgaatacgggtaatggctggcgagtattaaatgatgctgaggttacctgtgttggggcaggccaagacgtttatttctttgatggacaacttgaaatttacgctgatagtgatgaaaacaagcatcctaataatgcagtttattcacattactattacacgggcgtagttgaaaaaacaaatgttagaaatgtaatatgggggggtaaaagccttctacatactattgcgtcaatggttgagtatgctttcactctatttaagaaaggagcggaaacatgctagatcatatgctgtttaacaagcttccatggtttaacgtgaatcaaagcgacaatgaaattaaagccaatggcattcgctatgtagcattcccaccaacagtagaggttaaagaagattatagctttaatgaacaaactgaaagttgggacagttccaagattaaatggactgattccccctttgacatgcacacttataaaaaaggcgatgaagctcgttgcattggcgcagatgacgattactacgttgttgatgacctcccagactataattcttcaactggaagagcatacaaagcgatcattaaaaaagagctattcatagaaaactgggggggtaaaacctcgccaagccgcttttggcaatggattaggtcacttctttgctcatgcaaggaggtggcttaaatgctagatcatatgctatttgatcgtaaaaaatggcgaagcctgacggacgaaaacggcaactttaatgctagttttctacctacatctggatatttgccatctgggtcagttttaattgatgataacggagctgttaaccctggcaaatctgttcaaagcattaattttcaaatcgttgggtatgacagaagaataaatgcatttatcacaaacaaatttgaaacgcaagacacttatagcttaggcgcgggaaatgagacttatggtttttattacagagtgctggtatcacaagctcgcaacttgaaatggtggggtaaaccccccctaatccgcttatgtcaggcatttagagctatcactagaaaggtggtggttctatgatcgaaaagatgatcttcaataaaaatgattatcttatgttccctaaaaaggtcaaaattcccaaaggaacttcaacaagcaccgtttttacggattttccaaatactacttactctttactgaacgcagatttggagctggatgtatgtgcctcttcaaataccgcttatttagtcgggagaagtatagatttgccaattatccgtgaaggagatagtagcaccgtctatggtcctgtatgggttcgaaaatcggactgtacggaaatcttagggggggtaattagcccgttaatccacctataccaagtacttagagccgccaccagaaaggcggtggctgtatgctagatcacatgaagtttaataaagaagactactaccctacaacaaaaattagtgtcggttatgtaaatacagaattaattggcagaaggataacttacagtaaatataaagtaggatggtctagagagggagtcattaatgcttattatagctattctatcaatagtgattcgattcaatggaataaaccggatgaaataggcggcttagcttctacgggtgaaatcacaggcgttgtggtagatcaacataatattccatattatattgttgacgttaatcattggataaataatcctaatactggtgatgggatatacacaccgcttatcaaagcatcggatatcatgactaagtatttatcaagggaacagttatagtattagtactcattgagtgctttttttatgcaaaaaattaaccttgctcacggggagttcccgtgggcttttttaatagaaaggagccaataaaatggctgatgaaaacacacaagttgcaccagtagcgggcgcagaagaaaacgctacacaagaaaacaaggggtttacctattactttagtgatcctgactctgccaacgcagaaatgcatcacgtagtaattacgttgccttatgagttgccagaacttccatggcactggcacattgaaaagccagacgacagcttaaaagatcctgtctgggacttgaaggttaatggctgggtagaaaactccaaggacggtcaagccgcaatcttgcaagaagctacaaaaaagcttgaagagttggacaagaagagtgccgaacttgaccaagccaacgacaaggtagaccaagcgatcaagtcaatgcaagaagttcaagctcaatcatctaagcaaaacttagctttgatgaagagctttactgaacaaactcaaaacactaatcaaattcttggtgctatgcaaaagaccttagcaatggtaaccaaggcagttggcgcaaatgctaataacgctacaccagctaacccaacaactgatactaagccagcagaccaagcaactgataagcaatagttaaggaggacataaatcatgactttaatggaacaaattcaagcaaactttttagaaatgtatcgtatggactgggaattcggcatctatgacaagaacggcatgaaggacctagtagtacaaggtttcttatcagttgaaaattaccaaaagattgtaggcgaagcttatgcgccagctactgcaacgcctcaacaataactcactttacgtgatcattagtctgctgattttcggtaaaggcttgggcttttaccttaaccgcagatttttcttttatccaccgcaactagcgtggatgatgaacaatgtttacttagactgttcaatgatgattgtgggcgttgcgttgctggtttacacctgttcacggtacaacaacaataaacttctaggggtattgttagcacttgtcgtggtgctgctagcaataatttcatcactcgaaattgaacacgtgatttttgcccatgaaatggagtttgtccagaacgctttgtcaaatacggcggttatagcctttattatctggacagcaaggcattattcgaagcgttaggggtgatatagtgcatgtcgacctaaacagcattatatcggctttatccgctttgcttttaggctactttacctttaagcaaaacggtaagaaaagtgatatggatagcgtggagaataaccgagattacattgttgaacagaataagcgtttaaacgcggaaaacaaaaaactactcaatgaaaatgaaaaactcagaaaggagttaagtgaaaatgaagccaaacactagaattttagattacgttaccttggtgcaagacggtgttttaaccgttgacgatgcaccacaagacatcaaggcagaggttaccaagtgggttcgctactttgcaggaatcaaagacgattcaatggtcaaggatcctgaaagcactacaccagcaccacaagtagaaaataagccagatactacttcttttttaactaagaaggtgactgactaatgagtttaactcaattaactagctacgcatgggttgcctttttggcagttgtggctgtatgtgttggcgtttcaactggcattgactgctttgccaaaaaatcaaacaagccgttacccaagcaagttatgaccatcgatgaaattgccaagtttgtagtaagtgaagcggctactctcgatatttcaggcgctgaaaagaaagttaaggcggtgcaagctttgcttgatcaagctaagcaagaaaacaagccagtcaccgaaactgtggccaaaggcgctgtccagcatgcttacgatcaaatgcaagccgattctgaaaagactacacaaggcgaggatgataatgtccaaccaattggctttgtaagtggtgatgattctgatgcaaaagactagatataagacgtacaacgagtacgtctttgaatcttttggagaatcgtttgaaaatcaaaagatagccaaaagaaaccaaacgaaaggtggtgaaaaagatgtcaaacttaaccgtatcaaagcgaagtttgggtgctgatgccgcaagctaccaatcagaaaacgtaagctacgccggcattaaatttgcattgattaagcttacacagggcactggatatatcaaccctaaggcaaaggctcaaatcaaaagctcacttgcccataggcttttaactggcggctacttttatgctacacactccggctctgtatcaagagcacgggcagaagccaagtatgctgttgaaaaggcgaaggcctatggcatccctcttggttcgtatcttgcggacgactgggagcagggcagtggcaacgacgtcaacggcgctgttggttcaaacactgatgctgtcatagcagctatgcaagtgatcaaagaagcaggatataaaccgctagtatatgctggtgcttatgtattgcgtaaccgtctcaacacagctcgaattgtaaagtcattcggaacttgtttatgggtagcttcatataaagtcatgggtcgtcaagattccgctgactttaattacttcccatcaatggacggcgtagcaatctggcaatttaccgataattacaagggttacaacgttgacggcaatatctgcttgatcgatttaaaggcaaattcaggtagttctaagcctaaatcaacaaacaagaccggagaatcgctgtctctgcatcccgttgtaaagtggaatatcggtgctgtcgcagtagtatccaattcaaagggagcatacgtttacacaagctccaaactggacaagcgggaaagcgacaagctaaaaccgtgtggttccatgtggcaggtgttcggattggaaaacggtgccgtaaaagttggcaaaaatcagtttttcgatggtcgtgccgtttatgtgaaggctaaccctatcgcatataacgacagcaaacatgcagtagctaaggttgttttacctcatactcatgcgctagacgctccaaaggctgacgcaggcaaggtttacggcttggagcttaactcaaaagtcgagatccagggaagagtcggacgctttttaaagattaaagagctacacaaaggcaagcaggtatatgtgacgggcaaccgtgcgtatatcgtgctgtaaactttacaaagatggatagatagccataatgagctataatttatccgtaattttatccataataaaaaagaaaaggagttgtaaaagctccaaatgtcgtgcataaagccacctcgggggattgttcccctggggtggcttttttgcgttatattttaatttttattgcaaatgtagatacaaaagtatttactaaataaaaaggtttaattaagacttgtaaggagatttataacaatgtgcaatgtggaattgaaacaatggggcaattcactagccgtacgactgcctaaaactattttaagcaaagcaatgcagaatggtgagcaattagctcaaaagttggatgatgccgctagacatgctagcgttaataagttaactaacgatttaaaaggcttttccaccgccaataatgacgctaaggtagaaaagctcaacaactgggtaggtgactaccttatgctgtgcgttaaggctaacgtccctgcattttccgacatcactacgattgtagatgctgaggacaagattaaattagcgaatgctattactagccagctgactggcaaagtggaataagtagaaaggaaacataaaatgaaaattgatgagataaaaaaagctaaaaaggttcgtgaagatgaaaatgaagtcatgtataaaaaccaagcaggagagtatttcaactacaacaaggtaaccaaaaaaataaatccttttgtcacatttacgccaaatgcttcatgtcgcgatgtgctataataatttggatttggatgattcattaatttggtcgaccgacctagcaaaaaccgctcacagtgtagctgtgggcgattttgacttttacggaaaaagtacggaaaatatttacatgcaattgaaacccattgagttaatttgggtgatttttatagcagtgaaagccatttttgcttattaatttaaaatttcaatattgactgaatttgaacaacgaggagtacattttatcgtggcttcagggcgtccttatgttagattgaagcaggactttggcaagtttgccagcagaatggatttcgtaactttgaatggctcgagattaatcatcaagggtcaagaagctggcagttatttgcttaatcgcgatgacgttttaaagctaattcatgatgtacatgtgaaatatggtgaaatggctacgatggtttttggccgagatattgcatatttgcatagcaatgttgaaaaagatgaacgcgactttttggcttactttgctggtaatagcactgtaattaatgactggaatgacttaccagataagatttatcagatcacatttggaatggacagttctaaggctgcagaaattgaacgagattttaattctaagcacgataaccagatttctgcttttgcttccgctacttttgccattgatgttaacacacaaggtgttaataaaggcgccggattaaagcatctcctagaaaagatggggatgacaggggatgacctgattgcctttggcgatgggggtaatgacatcgatatgttgaaatttgccaaatattcttatgcaatggcaaacggtatggacaaggtaaaaaagcaggcgaaatatattgcaccggccaatacggagaacggtgttttcaaagttttgcaaaaatatttagctgaagataaaaaatagcttgtaaaattaaattaatatgatatagttttaattaacttatagaaatagaggaaattgccatatgattcgtttactgaatctctaatatttgatttgttgtttagcaaaatactgtctttgcaccttgtttagtgcacccattttttgcttgcataccaagtattagcagtagatgaattgagggtggttttctttatcgaaatcaacctttatttgttgcactgttaataggatgtgagcatccagaacagtgctttttctttgcgacaaatcatgttagagatttttttgctgattatacgtttttgtcaaaaaagaatgaagaaaataatgggtttaagagattatattaaagctaaccgtcagcgggcaatgttagttctgtttttgattacgctaacgcaactgacaactacaatgtacacctacttaactagtccgcagttaaatgcaattgcaagtggtaaattcgaactgtttttggaattaatctttgtacaatttttaattggacaggtctgcaatgtcagttttaattggggaagtttacaaaataccaaacaaacacagacactttttcatcaggtaagacagcgaattatacgacattattatcagcagcctgaagacaaagtctcagagatggaaaatcatttgggaaatgacttgcagttagtgcaagagagttactataatgtttacttctattttgtttgtgacttaatttatattattttaactattggtacgctgtttacctttcattggatattggttgtctatacattattagttactttgcttgcagtagtagtgccaaaattgactgaaaaatataccaatcgagcaactaaagctgtttctatccaaaataagcaatttttgcagttgttagaaaaatggttcaagggtttagatgagctgcgacgctaccagaataaagttgttttgaaaaaggtggtgggacaacagagtcagaaactagagcagagtgaatatcagcgagataaattgctacattatactagcttagtgtctgcgatatttaatatagctggtcgtgttggtgttccatttattgctggaattttgtttttcaatcatcaggtaaatttaggagcgattctgacagcgggatattttgccaatggaattttttatagtgtagatagttgcgtgaacagatatacgcaattaaaatcaacgaaaactttgcgggatgatctggctaaattgcaaaagtgtttaccagaaaaagggtatgattctttaaaacaaatcgctaccgttcaaataaaaagcttgtcagtacaatatccaaatggtgaaagaattacttatcctgactttgaactgaagaatggtgaaaaggttgtattgactggtgattcaggtacaggaaaatcaactttattaaaagttttgttagggcaaattaagccaagtacgggtgaagtaatctattgcgataaaacaggaaaaaagatcaaacctgatttacgtcaattaggttatttggcacaggacttattgatctttcctggcagtattcaagaaaatattactatgtttaagcctaagcttaataaaaaaactgtacaagtgattcataagacggtttttgatagtgatcaagcgcgtttgaaaaatgggatagagacacagcttgatccacaacaggaattgctgtctggtggacagaaacaaaaggtagttttaatgcgggcgttgttgcatgagaagccgattctgtacttagatgaagcaactagtgcaattgatcaacaagcaacgacaaaaatcttccaaaacttaatgcaaagtagagcaacaattttggccgttgcacacaatttaaccgtagaacaacgagcattgtttgatcgtgaagttcacttggagggaaaataatgagtagcaaagaattatttaaacttaatccaattaaattctgtctggctatgggactacagattattgcagcagttggcgaagtagttgtagattatgtgttaactttgcaatttgatgctgccaaaaatagaaacttgagtttatttttaacttggacattaatccagctgtctagctatgtcatggtattcttattctataatttggcgggaatcatttggcaaaagttgattcaaaattacctgcatttaattcggcaagaactaacagatcattattttgccgatagtcaaaagcatgcggttagtgcagtgcaaaatcggatgactaatgatttgaaactgttacataatgactatttagattcgttccgctatgtagtagggatgctagccggtattgtcggtgtagcctttagcttggtgacttttcagtggagtttgttagttgcttgtttaatttttgccgcaattcagatttatttacctaaattactggataagccattacaaaaagctactgaaaaggtatcagtagctaatcgaaagtatttgaagactttaggtgattggttaattggcttatcagaagttcgtcgctatttggctagcgataagctttttaagactattgctgaaaattcaggacgcttggaagcagcaaatattgagaaggaaaaagtagatcaggaattagattatctgaatcaattggcttattcattaggagatgtgctaatctttcttttaactggatttttggtagtaaataattgggctgcttttggtttgattgccagcattggcaacttcaatggagcactatttggttctttgcaaggagttgctaattatggtggaagaatgcgagcaacaaagaaattgcgagaagagatttttgtagctaaaaagaaaattcagtctgaacagaaaagtaatttagaacaagcggttagtttttcaatccataatttagctatcgattttagaaacggtgaggccgtgactttcccagatttccaagttaaagctggagagaaaattttactaacaggtgattcaggtacaggaaaatcaactttactcaaattgattttaggtgaattgcaagccagtcgcggcaagattcaatactttaatcaaaagggtgaaaagattcaacctgatttagctgaaattggctatttgccgcaagatccagtgttattcccagtaacgattgttgaaaatattacgatgttcaattcaaaattgctaagtcgagttaaatcagccattgaaaaagttcaatttgcaggagatattgctaagttttcggccggcattgagactaagattggccttgatcaattgaatgtttctggtggtcagaggcagaaaattgttttagctagaagcatggtacaccagagtaagttgattttgattgatgaggcaacaagtgcaattgatcaggcggctacgatgaaaattttgcgtcagttgactaagacggatgcaacgattgtattcattgctcacaactttaatcaagaaatgcatcaattgtttgatcgtgaaattcatttaaagaaataaaaacaagctcataaccacaaagttacaggttatgggcttgttttattatagccaaatttgttcgaaaatatcttctttaaaaccgcaagttaaattactgtcatcaacgactaatggccgcttgattaacttaccattttttgacatcatatctgcagcttcttcaatcgtcattgttggcactttttctttcaaattttctctgcggtaatcttgaccgtgtgtattgaagaaatattttagaccacgatcttgatatttggtcatccattttaccaagtcttctttttttggtggctgttcaactaaatcttgaaattcgtagttgacctgatggtcatccatccacttgcgtgctttacgtgaggtagagcaacgtttataaccataaaatttaatcattattttccgtccttatttttgtaaaaattttctaaaaaattcaatttcttcatcatttgcgatgtcagctaattcatctttttgatcaacaaagaaaacatgaccacgtggattttcctcatcgccataagatttgcaaatagcatgaacgccgcggccgagtaagaagccaaacagggtaaattgcatgtcatgtaagaaatctttgttggcagtaatcaaaaaagttggtaggaaattatgattgatatatttttcaacatcgagttgttcatgatacttgttaactgcatttttagtgaagtaggcgctagccatgccatctaaattgcttggggttaacatgaaggaagcagcacaattcaagccgacagccctaaattttaagttcaatggtttgtaagaaaataacttggcataatctggattagtcaaaatagtgacatactgctcagccatttgaccaccggcgctgtcgccaacgataaaaacgttgttgcgatctagacgatattcttcagcgtgctcatcaacccaatgcatgtagcgatcaacatcgtctaattcatcagggaattccgcgttttctggtgcaagacgatagttgggattgatgaaagcaaaaccgcgcttagctaaacccattccataatattggtagatttctttagtaccataaacccaaccaccgccgtgaatattgatgatgacagggaagggagcttcgtgctttttgggtaaataaacatctaaagtatgccacttttcatctggaccataaggcagattatcaagacgttcaacttcagggatgtcgtgaggcaagccactgtcacgtttggtgtcatgctgatatgcaccatctctaaagtcagtaacaaactttttgattttatctttaagttccataattgttctcttttctaataattatctatgttaactcaattatactttaattgaatttgaaaaaataaaaacttttttgaaaaatcctcttgcattttaattaacgtttccctataatagtctatgttctgttgaggacgtacaaacatacaagatggtctggtagctcagctggatagagcaacagtcttctaaactgtgggtcgtgggttcgaatctcacccggatcataaattatgcctgtaagcattggtcttacaggctttttacataccttaggtatctatgtgctaaattttactacaaagacaatatttttttacatttgatattgtatgatacaaatatatgacaattattaacttaatcttacattattagtgaatcagttgactaaagtttggaacgagcttattctaaaattgatttccaaaaaataggatcgacaagtgtgaacgacaactatttttaacattatcggaggaattaagattgactacaaccaaaaaaatcattgttagattggcatgcgcgactgttcttggtacggcaggggtagcgctgacacaagtaaatataccacaaactgcagttgtgaacgctgcaactacctctgttgcagcccgcgcacttggagttgatgttgctagttatcaaaacgctgacttgtcaagtcatgcgcaagctggagcacaatttgcaattgttaaagttagcgaaggtacttcctatcgtaaccctaaggcatcaagtcaaatttcaacggctttatcaaataatatgatgccaatggcatatcactttgctacttttagttcaaatgcaagtgctgctgctgcagaagcaaattatgcagttcaagctgcccaagcattcggcttacctaaaggttcatatattgcttgtgattatgaaacaggttcgggcaataacatttacggtggtaaaacgccaacggctaatgcaattattgcttttatggacactataaaaaatgcaggctataagccacttctttatgctagttcatcagttttacaaaataatattgatactaatagtgtaattgccaagtatcctaactcattgtgggtcgcttcatacgctatttcaggtagaattgatagtccaaacttcaattacttcccatcaatgaatggcgtttcaatttggcaatttactgataattggaagggattaagcgttgatggaaatattgctgttttaccattatcaattgacggtaatgtaacttccaacaatggcgcaatttcacaagctccagctaccagcaacaccaattctgctagctcttcaaatgcttcatcaaatacttcgaataagagtacttcatcagatgatgataagggttcagcaactgctggctatgtgatgaagaaatcatatatctataataaaaagagtgagcgtcaaagcggctactatgcagcttatactaatattactcattatggtgtagtgactcttgataatggtaagactgccttaaacatgggcaatggtcgttacattatggcaagtaatgttttaggtaattcacgtgtacttaagcacaatgcttatgtatataataacaagggaaaccgcgctaactggagagtgcttagaaaaggtacgccaattaagacctatggttcacggatgcgcgttaatggtaaaagctgttaccgaatcggacgtaacatgtacgttaaggcggctaacttttaattaaaaaattgaatttatcaagaaggaattaagcttaaaggtttaattccttttttcatgccgttttttgtataattaaaagtattcaggaaacgcctgaattaattaactgatagggatgaaataaacttgaaaaaaagatttatagcaataatattgatgctactgactttaacgggttgtactataaaaagtactacgcctaagaaggctaagtcgtcagttaaaacggttaaagtcgataaacagcaatctaaggaaaaacaggctaagtatcaagtgatagaccaagttttgcgaattcaacaagatggcgttgatatttatggtcatatatatctaccacagggtttagctggtaagaagaaagcagtaattttggctcacggattggcaggaaattaccgtgatctaaccagttatgctaaatatttagctagttgtggctatgttgcctatacttttgattttcctggtggagctaagaatggtcaaagtagtggtgtagatcaattaaagatgtcaatttttacagaagaaaagaatctacagctggtattaaatacaattaaaaataggactgatgttgaccgtaaacaagtgtctttgctaggcgagagtcaaggtggagcagttgccgcaatgctcgcaagtaaatatccgcaagaagtaaagtcattgattttgctttaccctgccttttcgatcactgattatgcgaaagcggcttttaaatcagaaaaacaagtgccagacaagctcaacctatttggcttcacaattggtaaggcctattttgaaaacttgttcaagtataacttgttaaaagaagcaactaagtatcatggtccagttttaataatgcatggtacaagtgacatgattattccagattcttattcaattatggctaataaaaaatttaagcactcgaaattatacttatttaagggtgcaggtcatgattttaaaggtaaatatcatagtcgagcagatactttaattgataaatttttgcagaaaaatgggaaataaataatgaagaagaaataccttggtttattggctttattaagcctattgagcgtttttgctatttggggtcaaagcgttagagctgatgttgattatgatattgataatgttagagccatagcaagagttaataaagatggttcactgacaatgtatcgaacaattaagtattcatttgatagtgatgctcgtggcctttattataagcaaaatctggctgtaaaacagaagttgagcaacattcaggttaaggtcgatggacaaaatataaaggccgcaacaacgggcaaaaataatacgtataaattgcaaaagcagggcaattcttataattttaaggtttatcatcgaattaaggaaaatgataaggttaaagttgagtattcttatctaattcaccgggcaattactaattatcttgatacagctgagctgaactttaaaatagttggtaatggttgggatactgacttagatcatgtgcgtgctgaagtgatttttcctggggcagttaaggggctaaaagcttgggctcatgggccactaagtggttacactcaggttttgccaaaagagggcaaaattattatgactgctgatgatgttgcaggagatagtggtgtcgaagtacatgcgatttttccaactacggtaactagtgctaatcagaatattgttaaagaaaataagaaaagagcaattgaaaaacaagaagcagcattagcaaaagaagctaatcagaagcgtcagcgtaagcagatgcttagtataggattgatgatcatttcagtacttgtcggttttgtggtgataattagaggcttttttattaaaaaagttggggttaagccaaaaatagagcgcgatttagtacataattatgaaattccagatatatcacctactgctgcgcaaattttggatgaagctgataaaccaaatgttaaagcatttacagcttatttgatgcaattagccggtaaaaataaaattaagatcgaaaaatatcaaactaaacatttaaagcggactaattatcgaattactttagtagatgatagtgttttgactgatgacctattagattttatttttaacaaagttggtgatggtaagtcatttacaacgaaagatttgcgggattatacttctaaaaaattgggtaggcgttttgataaatggtgtgacgggcaatataagcaagttgaggataaggacttgcttgataaaaaatataaaaagcagcgtagcaacttccgaacggggatgctcatgggaatgattgctagctttgcgatctgggtaattagcttaatgatggcaaataatatacccagttttgtgataataattggaatcatgatgatcgtcttagaagttgctgcattcatagtgggcaattctcgtttaagtatttatacccaaaaaggtgcacttgagacagatcaagttcgctgctttaagaaaatgctagacgatattggtcaattcaagatgaaagacgtcggtgatctgattttatgggaagacattatgccgtatgctgtagcgtttggtctatccaaaaaggtattgaagcagcttaagattgaatttgcagatgaattagatgctgcaccagttctgttttatagtggattctatagtagcagtagtgacagttttgagcatagttttgaacgtagcttctcttcaggcgtgtctactggtttatcttcagtttccggaagctcaggtggattttcaggtggatcgtctggcggctttggtggtggcagcggcggtggtgctttttagtgagaaatttttatactataattaaactaaaaaaggagggctaaattatgccatttgtacatattgaattaattaaaggtcgctcagatgagcagattactaacttaatgaaggatgttactgaagcagtgcacaagaatactggtgcgcctaaggaacacattcatgtaattatcaacgaattaggtaagcatacttatggccaaggcggcgagtggagagcttaataattagaaattgtagtaaaaggcgactcgattgtgagtcgcctttttatatagttaaatatataaacttgtattagagccttaaagctatgtgtgcataaatgaattatttatttagaatcccacgtaatataatgatgttgatgtctagatatttacgaggaggatttgaaatgaatttaaaaaagaaaattgcaatttctgcaactgcactgactgttgctctctctactgcatttccaattgctgctgcgcaaagtcagccggtaaaagcagtaggtattgtattggttcatcgtgttacagcaggtgaaaatttcgctaattggttcaattggcttagaactcgataaatagaaaaattaggaagcaggcaatataaagattgtctgctttttgcgtaaaaaaatttaatcactaaaacgatcaatcaattaacactacttcataaaaatcagtataattatgttcgttactattagtaagttatacaataaaagtggtgagaataatgtatgattatcgaaataatatcaaaataattttaaataaaactgaggctgatgataaaagtctcgaaaatagtttaagtgcgattaaagctatcctaaatatggccgaagataatacagctgaaaaatctgagactaaatcagtaactcaacctaagaataaaattgcaaatacacaatcaattgcacaaagaaatgcagatttaaagcaaattaagcaattattgattgggctgacagccttaattgagactccaggtgatgaaaaagctaaaaagagttcacttgatgctttacacaagttgacgtttgttccaggcgttggcaagcgctatggcaatgttttgggtaaattggatcaggcaattcaaaaatctaagacaactaaagaagctgttaacaagaaaatttttgaagaagcaatgaagcccaaagagcaacctaagcgcgattatcgtaaaggacgccgctatactgttattcgggctttatcaggctgtaatttgattaatgatagtggtcaaattgtttaccgtattaaagaatcacaaattcactctttgaatttaaagagcggtgacatagttgaagctattgaaaatcgagataatccaaattatgaagcagaagtcttgcgcgtggtgggttatcgcaaattgcgcatgcgtgattatgacccaatcgaagaattccggtatgctgtggtccgcggcaaggccaatcaattagctatcactagaaatattaagggcgaaaagttgagaattcgcggtaaggatatcacgattccggttgattcaagttattatcaaggtgaaaatattcatgttgaagatggttcaattgtagatctagcttggtatacgggtgatgttcgcattaagaaaaatcctgctgaggcagtacagattcgttggatttatcaagttgatccgcctaagaaatcagatctgtcgtatcaaaagaaaaataagtcaaagaaagaagaaacagaagagttaactaaactcgacatgaatttgcactatcagcgggtgggaattgcgattggtgataatcaaaatgaaggaatattagaagggattgtttcgcgctataatgggatcccaattccaatagatgcttttgaaggcaagaagaaggtaatggaacggcaaatcaaagacttagatattgtaatcttgatgacagcttatgctgctcatgatgctacttggaatattcaggaattcgcttcaaagtatggtgttaaatttgccgtttcttcatctaaaggctaccgctcttttgagcgagcattatatcgagctgaaaatggtttacctgcttatgaaggaacgcaatcaatcgattataaagaagttaaaaataaataatttgttaacattattttgtttgcttgagctaacagatgatttttcgttaaaatagtactaactaaaagaaaggacgcttaataatgaaaaacattaaacaacgttcctggatgagatggttggtatttttagcaggacttgaaataatcgcaatatcaatcaatcttttttatggaccgattaatattgcagctggtggctcaacgggtatttctattctagtcgatgcggtctgggggattaatcgatcaattacagtatttgtagtgaatggcttgatgctgattttggcggcaatctttttaggcaaaaagactacccaaaatattgcattaggtagtttgctcttaccagttttgatggaagttacgcctagctttaaagcagtgaataatgacctactagccgtaatttatggtggtgcattaatgggacttggagtttcgctactttatcgcgttaatgcctcaagtggtgggacaacaattccgccgatgattctgaagaaatatttttatttaaatcctgcaactacgcttttatgcattgatatggtaattattttcttgaacatttttgtcgatggttggaatgctttcttcttagcagcattttctcaagtggtaactgccattacgatgcgctacgcggagaccggttttgataaaaagtatcaagtcagaattatgagtaattcagatttagaccgaattcaagatatgcttaaagaagattatcaaggcctgacgatttatgatgttataggtggatatagcgacgaaagcaagcgtcaattattaatcgtagttgatccacgtgaatatgggccacttatttctaaagtacatgagatcgatcaggatgcgtttatcattaccgaaaatgttgcaaaagtgcatggcggtcaatggcgaatgtaaaaaaataattgatcttagtctaaaagcgttgtatgatataagagttgtatttgtggagacctccacatctgcaaccgcacggcttgaggttagaagtcttcttatgtaagaagcaccccagttcggcgagtctaagtatttttttcggaggtgtacaaatgtacgcaattattaagaccggtggtaagcaatacaaagttgcagaaggcgatagcgtatttgtagaaaagcttgatgctgaagaaggtagctcagtaacttttgacgaagttatccttgttgctaatggcgacgacgttaaggttggtactccattagtagatggtgctaaggtaactgctaaagttgaaaagcaaggcaaggaaaagaaagttgtaactttcaagtacaagcctaagaagcactcacacagcaagtatggtcaccgtcaaccttacactaaggttacagttgaaaagattgaagcttaattcagaggtgaaatgaatatgaacattttaggtatgaaattatacgctcaccacaagggtggtggttctactgccaacggtcgtaactcagctggtcgtcgtttaggcgccaaggctggtgacggtcaaactattcacgcaggtactattatttaccgtcaacgtggtactaaggttcacccaggcaagaacgtaggtcaaggtggagacgacactttatttgcacttgttaacggcgttgttaaatttgaacgtcttggcaagtacaagaagcaagtttctgtatacccagctgaagaagctaagtaattcagagattaacatgaaaaggcgagtagcataagccacccgtctttttttatggctttttccgcccagaaacatgtataattaaaccaatatcatacaaaaagagggtctctgagatggaaaataggcaagaattattatccttaattaaccagcgaattgagcatgtaactgatttaattaaagaagcaaatgcagatgcattgattatttttaatcaagctaattatcgatatctaaccaattttacaggggaagaagcacaattaattttgactgctagtggcgaacgagtacttttatcagattctcgttttgctggacagattaaagcacaagcacctggcaaaatggatgttgtaatgaaacattctagtgattatgaagaacttactaaggccttgaaaaaaatggacgtcaagagggtcttagttgaaggtgaattcgtttcagcgagtgaatatgaaaaacttaagcaactaaatccagaacttgaatttgtgatggttgaagaattggttgaacgagtacgtaatattaaagatgatcttgaaattgcggcattgcgcaaagcaattgatatttcaatggaaagctttaaaggtattttgccgatgattaagcctggcgttaaagaacgtgcaattggtgctaaattggactacctatttaaagttaatggcggcgatggccctgatttcgatacaattgtagcttccggtgtgcgttcggcttgggctcatggcgttgctagtgacaaagaattgtccgaaggcgatatgattgtcattgactttggtagtttttatcacggttatgcggcagatattactagaactgtttcattaggtgaagttgatgctgaaatgcataaaatctatgatattgtacatgaagcacaacgccgtggcattgccgcggcagttgcaggtaatactggatatgatgttgataaagcagcacgtgattatattacagaacaaggttacggtcagtattttggacacgggatcggtcacggcattggtcttgaaattcacgaattgtgtcaaccagctttaccttttagaactactaaattggtcaataatatggttcataccgtagaaccaggaatctacttgccagacaagggcggtgttagaatcgaagacgatattttggtccatgatcaaacgcctgaaactttatccactttgccaaaggatgaattgatttccctataatagctatttaatttatcgtatttatggtaaaaacgcttcaagattggtaagataataattgtagaaatgagggacttaatatgacaatgatttcagtaaacgaattcaagaatggcttgactattcaatacaacaacgatttatggcgcattgttgaattccaacacgtaaaaccaggtaagggtagtgcctttgtacgttcaaagcttaagagtttgagaactggtgctgtacaagaatatactttccgttcaactgctaaggttgaaactgcagacattcaaactaagtcaatgcaatacttgtacaatgatggctcaagttatgtattcatggatacttctacttacgatcaattagcaattccaaatgaacaaattggcgatgaagctaattacttattggaaaacatgattgttaacgtagttatgcacgaaggtgaaactttaggtatccaattgcctaatacggttgatttgaaggttgctaagactgaacctaacatcaagggtgatacttcatcaggtggtggtaagccagctactatggaaactggtttagtagttaacgtaccattcttcattaacgaaggtgacgttttaactattaacactgctgatggtacttacgtatcacgtgcaaataagtagtttatttgaggtaacaaaatggcagatagttcaaaaattcttttaagtggtgaagaaaacagcgagcaaattaaaattgatccaagtgttctagaagttattttgggtattgctgcagaaaaagttgatggtgttgccggaatgcgcggcagtttgaaatcaggcttaaactgggttttcggtcgtgaagatcatggtaagggcgtaaatattagtgttgatgacgataataagctaattgctgatatttatgtttatcttgaaagcggcgttaacgttcctaaggttgcaatgacgttgcaaaagaagttgaaggcacaattattgcaaatgactgatcttgagctgaaggcaatcaacgttcatgttgtcggtttagttttcccagaagatgaaaatactgaccagactacatcagagctgtttccggaggacgaagaagaaaaataatgaaccaacacgaaagtcgaaaagttgctatgcaagccgtttatttggctaatcaggagccagatttaactgccgaagaagttgaagcaaaagtcgttgcaacgcttaatttaaaacagctttctgcctattctaagaagttaatcgaaggcgtactagaagatcgcaaaaatttacagtctgaactaactagtcatttgaaaaagggctggcgtcttgaacgtgtgagtcaaactgtggtagccatcatggaagttgctttatttgaaatcaagcatagcgatgaaattgatgctaaggcagcagttaacgaagctttaaatttatgtgacgaatttgctgagcctaaagaaaagccatttattaatggaatgttagcaaactttgttaaatagcgatgaatagccggcagttttgccagttatttttttacaaaaggagaacgggctttatgggaaagattcttgatggtaaagcatttgcaaatgaattagggcaaaatcttaaagaaaaagttaagaaattaaaagaagagggaataacgccacatttttgcgtaataaatattggggatgatcctgctagcaagatttatgttcgaacaaaaaagcggcgggctgaaaagatgggaattatccaagatatttatcaaatgcccgctgatactaaacaggaagaagttttagcattaattgataagctaaatgctgatcctgagattaacggcttgatggtacagttgccagcacctgaacagattgatgcagatgccttgttaaaaaggattgaccctaataaggatgtcgacgccttaacgcctgcgaatattggtcaactttggatggaaaatcactttgttgaaccggctactgcagaaggcattattgctttattgaaacattatcaaattacgctggctggtaagagagttgtagttattggtcgaagcaatatcgtaggcaaaccagtagcggcattaatgttagaggaaaatgctactgttactgtttgccatttgtatactaaaaatctggctgaaattacacgacaagccgatatagtagtttcagcaacaggacaagcatttttggtaactgcagatatggttaaagatggggcagtggtcgttgatgtgggcatgaatcatgttaatggcaaattagtcggagacgttgactttgataatgttaaagaaaaagccagctatattactccggttcctggcggtgtaggtcctcttacagtacaattcttaatggaagcagttgttaaattgactaggagacaaaatggccgagaataaatatttaacggttactgatttaaattattatattacgcaaaaatttaagaatgatccttacctgcataaggtcttcttacaaggtgaattgtccaacttccgttatcggcgtaattcgcaccagtatttttcactaaaagatgaaaaatctaaaattaatgtggtgatgttccgttccttctttgataaggtgaaatttaaaccagaagaaggaatgaaggtttatgtggttgggtatgtcagcgtgtatggcccacagggctcgtatcagttttatgctgaacaaatggaaccggcaggattaggtgccttatatgagcaattgaagcagttgcaggccaaattagccaaagaaggtctgtttgatccagagcataagaagaagttgcctcattttcctgatcgaattgcagtagttactagtgcttctggggcagttattcacgatattatggttacagctaatcggcgtttcccgcatgctgagattgatttgtatcctgcgcaagtccagggtgatactgcagcggattcattagtgagagcaatgcgccagattgccgctcaaggcgacaagtatgatgtcatgatcatcggtcgtggtggtggctcactagaagatttgtggccattcaatgaagaagaggttgtgcggcaagtttacgcaatgcagatgccagtaatttcttcagttggtcatgaaacggatactaccttgtgtgatttggtggccgatgcgcgtgcagcaacaccaactgctgcagcagaatatgctacgcctaatacattggacgaaattgcgcatattaagcaattaaccagccagttggtagctagcatgcaaaatattattcgttcgaaacgtgagcgcttaagtcgggtgcagaattctgtcatcctgcgcgagccgactagactgtatgatcagcagattcaacaagttgatcaattaaaacaaaggctgcaaaatagtatgcaaaatcggttgacccattctgtccaaggttatcaactgttgaagcagcgtttgtttagcgttagtccagataagagaatcggccagatgcagcaacaagagcattttttacagcaacgactgattgataatatgcagcactatttgaaaaataaacgcaatagttttacccaagtaatgcagcagttggatgactatagccctttgaagacgctagagcgaggttttgtttattcaactgatgaacaagggaaaaccattagttctgtgaaacaagttcaaaaggatgatcatttgcgattgcattttaaagatggacaagttgaagcagtggttacaaaggtaaaggaagaacaaaatggcagtgaagaaaaataattttgaagaacaattaactaatttggaacaaatcgtgcaaaatttggaaaacggaaatgttccgttggaagatgccctaaaagaatttcaggagggcgtaaagattagccgtgatttagaaaagaagcttaacagtgctgaagaaactgtggctaagttgattgatagtgatggcacagaacacaaattagatccaaataacgcatcagcaccagaggaataaatatgacagcatttacttattttaaagatgaatggaccccagtaattgatgattatctggctaagcatttggctagtgaggttgaagatcaaaagatcagtcagattatggcctactcagtgatgggtggcggcaagcgcttgcgtccgttattgtttttagctacgttaaatgctttaggcagaaagattgaagaacctgaaattaggattgcctgcgggattgaactgattcacacttattccttgattcatgatgacctgcctgccatggataacgatgactatcggcgcggtaagctgactagccacaaaaaatggggcgaggctgaggcaattttagctggggatgcgctcttgccgatgggaattcaatggattgcggaaggcagtaagtcggcgaaattggtagatttaattaccaaagcagttggccctaatgggatggttggcggtcaatatttggatattgattcaactaacaatgctagtgttgcgggtgatgccaagtttatcaataagatggaatggctgaagaccggttgcttaattcaggctagcgttgagatggctgcagtttatgcaggagctagtgatattgaacaggtaaaattagtcgattttgccaaaatttttggtcgttcataccaaatctatgacgacttggttgatgtcgttgaaactagtgcagaagctggtaaagctacgcacaaggatgaagctgaaggaaagaataatactttaactttgttaggaattgatcaaagtcgcaaagaactaactgacttaattaagcaagcacaagatgatttgcatggactaaatggcgaagtgctaactggctttttagatctttatcaaaaggtgttataaatggcaaaacaaagagcagatattttattagcagaacaaggaatttttcattctcgttcagctgcccaaagagcgattatggcggggctggtttctgatcacaatcatcaacgaattgataagagcgggactaagtttcctgaaggggaaaagttttacgtgaaagatgatggtaagaaatatgtttcgcgtggcggctttaaactggaaaaagctcttaaggtctttgacattgatttaacaaataaaatttgtttagatattggtgcatcaactggcggttttactgatgttgctttacaaaacggtgctcagatggtctatgccttggatgttggctacaaccagttagcttggcaattgcgggacgacccgcgtgtagtggtgatggaaaagcagaatttccgctattcgaagccggaagattttgatcaaggactgccagattttgcaatgaccgatgtgtcctttatctcgttagatttgatcatggcaccgatgtatgcaattttgaagaatcaatgtgatgccgtttgtttgattaaaccacaatttgaagctggccctgagaatgtcggtaaacacggtattgttcatgatcatgaagtgcacaaggcggtaatcgagcacaccatgcaaaaggcattggagatcggcttcaatgttttaggcgttgattattcaccaattaaaggtggcaaaggcaatattgaattcttgattcatttacaaaaagacgaagcaaatggtggccgcaacttatggcaagggagcccagctgaagtggttgagcgcgccgtaagtggtctataggagtgaagctatgctagttgagctagatatcaaaaactttgcaattattaaaagcttaaaggttcgttttcaagaaaaaatgacggtaatcatcggtgaaactggtgctggtaagtcaattattattgatgctgtttcattactgatgggtggtcgcggtcaaaaagaaatgattcgttcgggtgagtccaaggcgattattactggcttgtttgaattggatgatcaaaaagaaaagatcgcggaattgtgtgatcaatatggtttgccgcacgatgacgatcagctggtgattagtcgtgaattagctgtcaagggcagaaatgtagtccggattaacgggcaattgacgacgattaatgttttgcgcgagattggtagctatttggttgatattcacggccagcatgatcagcaaattttgatggatcaggaccggcagattgacctagttgataattatgcccctgcttcttttaaggcagatttagccacttatcaaactgattatgctcaatggcaaaagctaaccagtcaattgctgcacctgcgtcaagatgcccaagaattagctcagaagcaagatattctgcagtttcagaataatgaattggaagcagccgaccttgaggatccacaagaagatgagaaacttgaggaagaatataacgaactaaataattatcaaaaaattgcggatacggcgaattacttcatgcaattgtatgatgacgatgagcatggaattgcaactttacttggagatgcgcaaaatgctgcgactgatttaactgaatttggttcaaaatttaaggattttgctaagacagttgatgatggagtttatgctttaaatgacgcccgcagtgaattatcgaacttaatggatgcaatggacttcgatgaggaacgttttcaatacgtgactaaccgcttggataccttgaattcattgaaaaagaagtatggcccaaccttggctgatgtgtttgctttttatcaaaaagtacaaaaagaactcagtcaatttgaaacaggcggccttgatgaggaaaaattgcaagcagaagttgccaagattgaagaaagaatgacccaagaagctagagatctgcatttaatacgcgaaaaagtggctcattctctggaagagcagattaagcaagagttagctgatctctacatggaaaaagctcgcttttctattaattttgatgaaacaaagacatttaccgataagggaactgatgcgattgttttcttaattgcacctaatccaggtgaagatttaatgccattagttaaaattgtttctggtggtgaacaatcaagattgatcttagctttgaaggcaatcttcagccgagttgaaccagtgggtaccatgatttttgacgaaattgatacgggagtttctggccgagtatcggctgctatcgggaaaaagatgcactcaatcggtcgcaacaagcaggtaattgcaattacgcactcaccacaagtggctgccgcgggtgatcaacgctacttggtagctaagcaagtaaaagatggttcaacctttactcaaataggcccacttagcaaggaagaaaccattacagcgattgcacagatgatggctggacaagatgtaaccgatgcagcaaagaagaatgctgcagatttgattaagagtattaaagatgactagtattagtaaattttggcgtgatttttgtgtagaacatcaagtaagtcctacagcattagaaggtgcttttgcttttggagctaatagccgggatgcagatattcttagtgatttggtcaaaagtggaattaagacggcaacgactagcctgtattctgcgcaagaagatgtaccggttgtagggatgtacgcaattgttttaaatggacgaaatgaaccagtttgtgtgattcaaaataagactgttgagattatgccatttaaaaatgtctcagctgagcatgcctatttagaaggcgagggcgatcgctcatatgaatcttggcgtaaagtacacgagaaattttttgcgcgcgaatgtcaagaactgggacgagagttcacagatgaaactgaagtagtgtgtgagacattcgagaaaataatttagtaaaggagcagacgattttgtctgtttttttgtatgcaaagagaaaacttgaaaaagaaacaattttagtgcaaactagatatattacaagttaagaggagttcagcatggcagataaaggtttattacttgtgctttctggtccttccggcgttggtaaaggaactgttaaaagcgcgattgttgaaaacaaagtctttccatttgaatattcagtttcaatgactacgcgtcaaccgcgaccaggtgaggttaatggccaagattatttttttgttagtgaagatcgctttcaagaggctattaaaaatggtgagttgttagaatataataaatatgtcggtcactattatggtacacctcttgcaccagtgaagaagatgcttcatgatggcaaagatgttttacttgagattgatgttaatggggcacaaaaagtacgtgaaaagatgcccgatggcgtgtttatctttttaaccccaccagatctacatacgttacatttgcgtttggaacaccgtggcaccgagtcagaagatgtaattcgtggtcgaattaagcaagcgcgcaatgaaattttggagatggaagactatgattatgcagtagttaatgatacagtagctaatgcagttgatcatattaaagcgatcgtcgatgcagaacatgtcagtgttaaacgtgtaattgatgactatcgtaagatggtcaaggaggattaattattatgagaattacttacccatcaattgataaattattgtcacgtgttgattcacgctattcattatctgttcttgccgctaagagagcacatgaacttgaagctggtgatccaccaactttggaacattttaagtgtgataaggctgttggtaaggcacttgaagaaattgctgctggtaaagttactgttgacccagctcatgccgaggttaacctcgaagattaatttattgaccttcatcctttggggtgaaggtcttttttacaggtgattaaatgattgctcaggttattgttgatgtagctgcacggcaaacagaccgtatttttgaatatcatattccaacagaattagaaaaggatattgcgattggatcaagagtagttgttccgtttggtcctcgtaaagtgcaaggttttgtggtggggatcactgatcaaagtgaatttaaaggtaaacttaaggatttgctagttgtggtagatgagatgccaccgcttacgccagagttggtaaagttatctgctgatttagcaaaaaatattttttcttaccgaattaaaattttacaagcgatgctaccttgggtaatgcgagcaaattatcgcaaattgctagtgccagctaatgatagagctgccaaaatgccgctgtttcagggtgatccaattgatttaaataaaattacggatctggcggagattaagcaattccgcaaattattgcaagatgatcaagcaaagattgagtatgtggtagaaaatcgagccaagaagaaaaaagaaaatcaatatgaactagcattaaaaaaagaggaatatcccaaaatttacaatactttacgtcaaaatgcggtaaagcaaaaaaagttattgatggatatcattgataatgcagcggattatcccaaaagccaaagccagctagaaaaacagcttggattgacggcggcgagtttgaattctgcgattaccaaaggttggttgaataaaaaaagtgttgaggtttatcgcgatccgttatccggatttgatgacggagaacataaaacagcggttaccttaaatggtgagcagcaaggtgctttgaaccagatcacccaagcaattgaacagcgccaggctgagacttttttgttggaagggattactggtagcgggaagactgaagtgtatttacacgctattagcaaggctcttaaacaggggcgaaatgcattaatgctggtgccagaaatttccttgacgccgcaaatggttcgtcaggttaaggcacgttttggtcaagaggtagccgttttacatagtgccctatctgagggagaaaaatatgatgagtggcgccgaattcgtcgtggcgagactaaggtggtcgttggcgctcggagtgcagtttttgctccactagataatattggtttaatcgtgatcgatgaggaacatgagtcttcatataagcaagaaaccgatccacgttataatgcacgtgatgtggctatttggcgtagtaaatttcataattgtccgttggttttaggaagtgcaacaccatcgttgagtagccgtgcacgcgcccaaaaaaatgtctatcatcttttacggttaactgaaagggctaatcaaaagaaattgcctaaagttaatttgattgatctaaagcacgtgcagtttgctggtggtcaatttgatttatctgttgagctagtagatgcaataaaaaagcgtttggcaaaaaaagagcaggttattttaatgctcaatcgacgtggttttgctaattttatgctttgccgtgaatgtggttttgtattaaaatgtcctaattgtgatgtttctttaaatttgcataaggatactaacagtatgcaatgtcactattgtggtcatactgagccagtacccacacgttgtcctaattgccaaagctcgcaaattcgttttttaggtgcaggtacacagaaggtacaagaagaattagaagagcttctgcctggtgcacgaatcttgcggatggacgttgatacaactagaagaaagggtagctataagaaaattctagatgcctttggtgctcatgaagctgatattttgttaggtacgcaaatgattgctaaaggattagatttccctaatgtaactttagttggagtaatcaatgccgatacaggattatggctttctgactataatgcttctgaaaagacttttgaattattaactcaagtagctggccgtgcaggtcgtgctgataaggaaggggaagtcttaattcaaacttataatccagagcattatgctattcaactagctcaaactcaggactacgaacgattttatggctatgagatgaatatgcggcatgctggtaactatccaccatatttttataccgtgctgatttccattgctgctaaaaaagaacagaatgcagctcgtgaggcttttaggattaagaggtatttgaatgagcacttgcatgagccaacgattattttgggaccaacgccaagtgcaatttctcgtgtaaaaaataaatattattatcaaatactggtaaaatataaaaaagaaccaaatttaaatgaattattacaccatgttcaagattccgcgcaggaagctaagaaatatggtttaagtatttttattgataatgaaccagagagaattatgtaaggggatgctttaatgacatcaataatatttatgggaacaccgaaattttcagttccagtacttgaagggttaattgatgaaggctatgagattaaagccgtggtcactcaacctgataaaaaggtaggacgtaagcagaaaattactaagtcaccagccaagatcgcagcagaaaagcatgatttgccaatctttcaaccggttaagttgtctggatcagacgaaatgcagaaattaattgatatgcatgcagatttgattgtaactgcagcatatgggcaatttttaccaactaagtttttgaattcggttaaaattgcggcagttaatgttcacggctcacttttgcctaaataccgtggcggtgcaccaattcaatattcactaattaacggtgataaagaaactggaattaccattatggaaatggttaagaagatggatgctggtgatatttatgctcaagaagcaattaagattgagcctgatgataacgctggcactttatttagtaaattatcaattgttgggcgggacttattgcttaagactttaccagcaattattgatggctcaattaaaaaggttccacaggatccagaaaaggtcgtcttttcacctaacatcactaaagaacaagaaaagcttaatgttgatatgacagcagaagaggccaacgatatgattcgtgctttgaatccagatcctggtgcttatttgatgattgaaggcaaacgtttcaagatctggaaggcagaaattgcatctgattcatcaagtttaaatgccggctctgttgttgctaacaaaggacgttttgccattagttttgctgataattcagtacttaacttacttgaagttcaaccaagtggcaaaaagagaatggacatcaagagctttttaaatggtcaaggtagtaagtttgtcccaggtgaagaaattgtcgatcgataagagtgcacgtgcagtcagcttagagacattgatcaaggtcttagatcaaggctcctattctaatattagtttgaataacagcttaaagcactctaacttgtcaattgcagaccaaaatttagctactaatattgtttatggcacgattcagtatcgattgtttttagaatatcagttaaaaggcttagttaggacaaaactgaccgaaaaatatattaagccattattgttaatgtcactttaccagttgatttttttggataaagtgcctgatcgtgctgtacttgatgaggctaataaacttgctaagcaatatggcaagcgacattcagctggctttcggttggtaaatgggattttgcgttcgtttactaggcgcggggtgattttaccagctgaaaataatccagttaaatatttaagtgtcaaagagagcgtacctgaatggttagttcaatatttaattgataactggggcctagacaaggcaaaatcagttttaaacagtattaatgagccagctaaaaacagtgtacgtatttcaaagttggcagataaagagcaagtttttgcccagttagagcgggataactatcaaccacaatggtctaagttatcaagcgatgatgtgattttgagtcacggtggcattagcgaaagtgatttgtttgaagaaggcaagttaacaattcaagatgaagctgccagtttagtcgtagaagcttttgactttgaacaagatgagcatgtgcttgatgcttgttctgctcccggtgggaaaaccgtgcaaattgccgaaagcattgttaatggtgatgtgactgccttagatattcatgataaaaaattacgtttagtacgagataatgcccagagaatgcacgttgcaaataaggtaaagactaaggcatgtgatgcacgtaaggctacagagatttttgcggcaggtgaatttacaaaaattttagtcgatgccccttgttctgggcttggattattgcgtcgtaagcctgaaattcgctatactaagagacaacaggacttacaaaatttacaaaaaattcaattggcaatcttaactgcagtaagttcactcttaaaaaagaatggcgagttggtttattcaacttgctcaatttcaatggaagaaaatgaagaggtagttaagaagtttttgcaagcacatcctgactttgaactagttccatttaagttaactaaacttgaatcaaagacagggatgttgaaaataatgcctgatctagatggcaatgatggatttttcattgctaaatttaagttacgaggttagatttttgattgaaacagcatacgcttcgagtattggtaaggtacggaaaagcaatcaagattttgtaaaagtttttaaaaatcaaaagggaattgtcttagcaattgtctgtgatggtatgggcggccatcaaggtggtgacgttgcttcaacaatggcagtcacccatttaggacataattttagtatgactgactttgcagatgctaatctcgctcataaatggcttgatgtgcaattaaattctgaaaatgaaacaattttaaagactgctgataagtttcctgacttaaatggaatggggacaacgattgtattggcgtttgcatttgataaaaatgccttaattgctcatttaggtgattctcgggcttatagttattctgaaggtaaatttgtccaattaactgaagatcattctttggttaacgaattagttaagatgggtcagattactaaagaacaagctaaacaccatccccagaaaaatattattacgcaagcattaggcgtctcaagtacgattgatcctgaatttgatgagatcaagatgggggaaaacgacattattttgctctgtactgatggcctaaccaattcacttagcgatccacaaatccaacaaattttggcaactaaggagcttagcttaagagaacgttgtaataaattgattagtgaggccaatcgattaggtggtggtgataatattactgtctgcttaatttggaacaaggaggacgagagcagtgatcgataaaggttatctgcttggggaacgttaccgcatcatcgataccttaggtgaaggcggaatggccaatgtctatctagcggaagatattatcctgcaacgtaaggtggcagttaaaattttacgccttgatttgcagaatgaaccgcaaacccaagctcgttttcaaagagaggcattagctacaagtgaattaagtcatcctaatattgtttctgtacttgatgtaggtaccgatcatggtttgccatacatggtaatggagtatgttgatggtcctaatctaaaagaatatattcaaaaaaattcacctttggatttaaatgaaattattcgaattatggatcagatattgagtgcagttgcattagctcataagcacaatgttattcatcgtgatctaaaaccacagaatattttgatggataagcgcggcaatattaaaatagctgatttcggaattgccgttgctttgaatcaaagctcgattacacaaactaattcagtaatgggttcagttcattatatgtctcctgagcaaacgcgtggcggaatggttactaaacaatctgacatctattccttgggaataattttatatgaattgatcacaggaactgttccgtttaacggtgatacaccagtggcaattgcactgaagcatgcgcaagaaccaattccttcaattcgcaagaaagattcaagtgtaccacaggcgctggaaaatgttgttttaaaggcaaccgcgaaagatccacgagatagatatgctacagctcaggaaatgaaagcagatttggatagtagcttggatcctgaacgggcagatgaaccggtttttgtaccatatcatggtaataacgatgataaaacaattgtattgcctggatttaagccacaaaaggaagaaaaagaagtggtggagccagcaaaaaccgaatcagtagaatcaagcaagctagtaaagaaaaagacttttttacagaatgtcaaaagtcacaaatggtggtggctgatctcaattattgccgcgggtttaatcatttttatgatgattttcgctttaagtggtactggaaataaacgacaggatgttaatattcctgatgtaactaatattgcagaaaaagcagctgagagtaaacttgaagcagcaggcttacaggttggaaaaattattaggcgacaatcagatgatataaaaaaaggccgggttattgcgacaaaaccaactgcaggcaatagtctagagcggggaaagagcgttgatttaattgtttccagcggttctagcatggttaaagttcctgatatggttgggaagaactatgccgaagcggcagaaaaattagaaaatatgggctttaatgtagttagagaggaccaatattctaataaagttgacgaaaatcaagttatttctcaaagcattgctgcaggtgtagaggttaagccgacgcagactacaattacgttgatagtttcacgtggcaagcaggctagatcacattcaaatatggttaccttgaaagacttaagtaattattctttgaagagtgctcaagactatgccaaagaacatggcctgactttacaaatcaatcaagaatattctgatgatgttgagaagggcttagtaatttcgatggagccaggtccgggtactaaggttgagcgtggttcaactgttaccatcaagatctcgaaaggtccaaaggaagacaaggaaactactgtaactaagacctttaccgttaactatgttggtgatgatctttctaagagtgagaagcctgataatgataaaggaagcaataactctgagtcagaatccgttaatggcaagggtgatcatgtccagatctatattaaggatgatgatcattccttgaacaatatttatcgtgacttgtatattaagcatgatatgagtttctcgattccatttaacattagagaaggtagtggacaattaaaggttgttcgcaatggcgatacagttttgaatgaaaaggtgactaaataaatgaaactagcgcaaggaaccgtcgttggtttgattgctggttattatgatgtagaaaccgctgcgggtatcgtgagaacgcgtgctcgcggcgtttttcgtcaaaaaaagcaaaaaccggcagttggcgatcatgtggaaattcagatagatgataaaggaatgagctatctggtgaaaatcttgccgcggattaatcgaattgggcgaccagcagttgctaatgtaagtcatgttttgttagtaatttctgcagtagaaccggatttttctgtagagctgttagatcgttttttgactttcttttcttggcaaaaagttggtgtaacaatttacttgtctaaagcagatttgctatcagaagcaaagttaaacacaatcaagcaagctttagcatattatcaaaaaataggttatcttgttttcactgattatcatgaaatgcaaattcagattcctaaaatgatcgaaaaaaatcaaatttggactttagcaggacagtcaggtgctggtaagtcaactttgcttaaccatttaaaaaaagatgctaatcaagcgactggtgcgatatcaactagcttgaatcgtgggaaacatactactagaaaggtcgaactttttaagttaggcgcgggctttttagcagatacgccaggtttttcgtcaattgatttgacaccaatcaagttgaatgagttatgtaattactttgttgagtttaaaaaggcaagtattcactgtaagttccgcggatgtcagcatttgcaggagccaggctgtgaagtaaagaagttacttgaagccagagaaattctggaaagtagatatgaggattatttggctatgcggactgagattagcgaaggtcgcataccggaatatttaaaatagaggtaatagctgatgatgattgcaccctcaattttgaacgcaaataatattgatcttaaaaatgatattgaaaatgcagtccaggccggaattagccgttttcatattgatattatggatggacattttgtgcctaatttatcttttggaccgcaactaatcaaagatttcaagcgtgaatttccgatgacagatgctgaaattcacttaatgagtgatgccccagataagttggtaccagcttttgttagtgcaggagcagatttggtcgaactacactatgaagcaatggacaagcctaagttatattattggttcgattatttagcttctaatggcgttgatgctgctttggcaattagtccagatacaccagttgaagtggttgaaccgtatttgccattactgaaacaagtattagtaatgacggtcaagccgggatttggtggacagagttttcttcctgaatcagttaatcgaattaagtcagttagagagattgtcggctctgattttgatattgaggtcgacggcggtattaatgatcagactattaaattagctgaaaatgctggcgctaatatatttgttgttggttcatacttgtatgaaaatggtgatgttggcagtcaagtacataaattagaaaagattattaagtaatgaaagcatatgcattgttgggcggtccaactgaattgtggcctgaagatattgaagaaaagctggctcaagctgatttagttattggggttgatcgtggtgccttgtttttagaagaactgggaataatacctgatgtggcagtaggtgactttgattctttacacgaaaatgacttaagccaaatagaaagtaatgttcaagacattcgttattctaatcctgtcaaggattggactgattctgagctaatgttgcagattgcttttgaagattatcatgtggatgaattagtgatttttggtgctacaggtggaagattggatcattttttgatcaatctattaatgttgctaaatcctgaaatgagattatatgcgaaaaaagtaacgttgattgaccaacaaaatctaatttgcttttttaatgcaggcacgcatgttgttcaaaaaagaaaaaattattcttatattggttttgcagctttaaaagcaatcgaagattttaatattattggtgcaagatatgagttgaagcactattctgggaactatcctcgtgttttttcatcaaatgaatttttgcctaatagtaatgaattcaggattagcttgcaaaatggtatgattgcagcaatttattctaaagatattaatcgttttcatgatttataggttaaaatagaactatagaaaagaaacaagggaattcaaatgaaatatattgactttgaaaaagatattgctggtttcgaaaacggtcgctacgaagcaagacttgaccgtgcaaaataaaatgtagaagactacatgtacaagaaccacgttcacatttttgataaaaagaagaagaaggaagtagctactatcaatggcttagctagaaatgtaacttatcaagatttggacttgccaactaaggtgggtgaaatgattactgagtatgcatacacgccaattgatgaaagaatggccgacgaaattcctgatgacgataagcatcacaatattatgaagtaaagtaaaacggtaagaagacaaaataaaatggtcttcttaccgttttttatataaatcattaaaataagtaaaaaaataagcttgcaagatcagtgatctaacaagctcttggtctattaggcacgagtaactttaccagactttaaagccttggttgaattaaaatataggtttttagaaatatttataagctttaaatcgttgatattataggatttaatgttttgcaatatcatagaatttttcacggtgttgcacaaatgttgcacaaacttgattgagtgaattaataattttggcatcttgttgatccttatattcatcaagtaagtgagcatagattgataaagtgattgctatattagcatgtcctaagcgtttactgatagcagctatatcaattccttgagaaattaagtatgaaacatgggtatgccttaaactatggaagtgaaaatcaggtttgttaagtccaatttccttaatggcttttcttaagaattgatttacagcagaactagaaggtggtaatccagttctaggaatagcaaaaataaattcagaattattaatttttaattgtttcaatttatctaataagaaagaattaactttaatctttcgaactgaactttcggttttagttggtcctagtatttttaaattaggattccaggttttattaatatcaataattttattcttaaaatcaatatcagtccattttaaagctgttagttctccaagtcgtgcgcctgtaaataaccccgctagaactaaatatttgctagtataacgaggagttaaatttgttaagcataattgtaccagcttattcatttctccttcattaaggtattctatggctctgacattgtcttgatttcctgtgatggttgtgcgattggtaaaattcttaacgattaaaccatcctctattgcatttcctgcacaagctttaaccataatattggttttacgaactgtagcaggagcatggtttttaccaagccaatttaagaagctttgatatttagctcttgaaatatcttttatttttgttgatccaaaatatttttcaagataatgataattggtaatatatctcttttgcgttgattttctgataatcgggaatttaaaagtaagataccagtgttcaaaatagtcagcgaacacagggttcttaactacatctacaccatcaatagaagcggcttccattttaattccgtactgttgtgcttcagacttggttttgaaaccgccttttgatttttgttttaaaatagaaacattcttttgtttttctggatcccattgagtttctctctttgaaaatcttacataccaggttttgccacgttttcttattgatgccattttatttttactcctatttttgctaaaatagggtagacgaaataagccgattccagtcggtttatcgttactctattacattataagtattattaagtttattgagttgcgctcacttactgttccagcagtaggtgggcttttttgttttatagattaattccacttatagttatcataaacatcaaatgtggaacgtcccatttcattattgtcatcgtcaaatatttgtgcccataaacgattgccaactttagacttactaattaagccataatgataagcatcccatgtagcttctttgttaataccacgcatgcaagtagtcttatccttgtcagataaattaacaaaacgatcattaacttccacagataagttagctttggaattaacagtaactttgcttacatattttgaccaattagtatctggatcatttttagaacggaaagccttaatgtttttaacaattaaagcattagtttggttagctttctgctttttaattgcattgctttttttagccttttgactttcaattctttcttgtctctcaatatttgcggtgctttgctcattagaatgtcttatccataagaaccctcccactaaaaccgcaattattataataaatcctattgcacaaccaacagaaccatctttattgtcttcttttttatcagtcatttgttttggctccttatttctttcaggtttaacgtcactgtggacgttttaaaacacaacagggttatgcagactttgaatacaatagcttcgacaaatatccatttttatcgtgttattatttctaaatgctaatgtatattccaaagcagcattaattgacattccaatagtataatgcaaaaagtttttaagtctgttatgtaatgctgctgagctcattccataaatgtctttcatttgattaaatgatttattcataatttctttttttaatgaatcttctggaacataaacatttgaagcaattatattagcttctgtttcaatgggctgaagctcttcaggataaggatttccttggctcttttgcgcatttattaaagcaacagaacttttatatgtggggtcgtctaatgcttgataagcatgtgaaagctcatgaataatagtaaatattattcttccccaagtattaatacttgcatttaaaaacataattggtccactagcgggaaaaagggtaaagccgcagactctatttgcaaaagtagtacttacttcatcaatagattgcgctgtaaatgaaatatttctagcagttaatccataattaaaatcatttaaagcattttgaccattattttcaaaagggaaaattaaattaggtgtataagcacatatatcgcatgtcccgattatcgaataaagatagttaataaccattggataccttacctctgatttaggtacattgtattttaaagcagtatcttcaactatagaattagcaatatcattgctactttcatatgaatcttctggtattaatctatattcgtatccaggcatattatttttcactctttctacgtcttttaacaatttgctttgcagtgttcatcaaaatacctaaagaatcttgaaaatcttgtttttcttcatttgacattccatcggtttcttttctaaacattgctaaaagttcttgatcatttttgttcagcgttacagattcatctgtaacatcatctaagacttcacttaatggtactttaaaaaaatcagcaaccttttgtgcactagccgttgaaggctttttcgtttcccatttgctgatgattccgttacttaaatccatttttctttctaattcagctactgattttatatcaggtcttctttctttccaaagcctcattacattgtctttcgcactcattttatactcctttattttgacacgacataagaaatagaacaaaatctaaaataaatgcttgcaatttagaaaacgggctattataataaaaactgttcaaaggaaacatagcaaaaaatcttttgaaccgccttttgtaagcataggtcttacgatttggcttatttcttatactcatataatagaataaattctattataaatcaatataaaatctaagaaaggagtctaatatgtcactttattcagtgattaaagacattgcaaaggaaaaacacaagtcaatttatcagattgaacatgacttgaagatgtccaacggaatgatcagcaaatgggatagaagtatgcccagagctgattcattacaagatgttgctgactacttaggagtaacaacacaatttctatttaagttagctagagaagataaggaggaaaagtaattatgaaactcttagattttgaaggtcagtcagttttagacagccgagatgtcgcaaaaatgattggtaaagaacacaagaacttaatgcgtgatattcgtacttacatcaaagatatagaggagagctcaaatttgagctcacgtcagttctttattccaagcacttataccagtaagcaaggaaaagtattacctaattatctgctcactaaacagggatgcgagttcgtagcaaataagatgactggtaaaaaaggaaatcaatttactgctcaatatgtgagtttgtttaatcaaatgaaacaacagattgaaattccaagtaaattcaatattcctaaaacattgcctgaagctttgcgtttagcagcagatcaggcagagcaattagcaaaacagaaaccaaaggttgattatttcgactcccaaatgagaaaccctggtcttatgacaactaccgaaattgcgaaagattatggttggtcagccaaaactttaaataaagagttgaataaacgtcacattattttcaaacaaggtaaacattgggttttatatcaaaaatatgctgacaaaggttatacgcaatatgaaccatatgattatcaaaaaaataatggtcaacatggagttcacaacaatcttaaatggactcaaaaaggcaagaaattcatttatgatctattagctaaagatgatattcatcccgttgcagaacaaatgaacttgttagaagtataggccaggtgatgacaatgcaactagtcattaatgacactgaacttcaaaaagcagttgatcaaattatgaaagaacgtggctatgtccctgaagagcaactgcaaggaagaacaatcagtattgatgaatttgctaagaaatacgctaagccacacggacaagcatgggtaaaaagaaatattctttatccatttcaaccggattggtgtagcaatattcatccaggcagaggcggtaagatgacaatctttgaatatccagctgctatttggatgaatgaacatagaaaggaaattgattgggatgctaaataagaattattaccgtgagtttaataaaccaatccaacataaagaaagccattatgaaactatctttggtggcatcttaatagcagtcgtgatcttaacgttcactcttttgtgctatggcttttgggatgcagcatttcaaattattggaggttaactcatggaacttagcaaagaaacacaacaacgaatttgggcaattactgatgtagttactagtcagtacgaaacagggagaaaaccatcatggaagcaaaacaaggaaaagaattagctaaagaactcaactaccaaaagattgaaaaacagcgtgatttttatgctggttgggattgcttaacggtagttgtagggaatacagttcatgcaattggtcagaattgtgagtacagaacaccacttgattttattgaagaacagttagctgatgacgctgataaattcatggttaaaggtcaattcacagatgcaaaggatatgtatcagtacttatttgaaaactgtgataatcgtgaagaattaaccagcttcctagaagactattttgacggaatggagatggctgactatggaagataaggatcttaaagactttcaagattggattaaaaaaatgcaagatgatgcagacgattgggtaatttatttagtctatcaatctaaaaagaatggcaaaacttactctggcgcaatgcgttggctgaataaaaataaaccagatttgccaggtaaatttactgctagcccaagtgaggttgtagcaaatgtggttcgatcaatttatgaagaagcagtaattaaggtccgtaatgaaggtttagataaagaggtagataacgatgattgatcaagattggttaaaagatagcattaagcaagaagcgaagttaaagtttgctgctagatgggaaaatgcagaatttaattcatccgaagcaagacaagcttttcaagcaattaaaaatactgatgagtgggaagcattcaagaaagtaatgatccaagcatatgaaaaagcaattactagcaatgtccttaatcagcttcagggcattaaaaatttgattcgcgatgcaggtgaagaataatgccagcatttaaatggagtgaaaatagaaagcctaattatagatggcttgtctacggtattgctggtgttggtaaaacaacattgagtaaatatcttaaaggaaaaagttacttgcttagcttagataaaagctttgaaagagtgagattttggcaaggtaacgatgatatttgggttctggatccagaccaaccaatcgaagacttaaatgacttttatgatttttttgatcctagtcaatatgacaacctagttgtcgataatatcagtagtctgcagaagttgttttttgtcgaaaaggctaaaggaaccaaaacaggattagctaacaagatttctgattataatgaatggaatacatatttaattagatttatcgctagcgtttttaaatggaacatcaatatcttagttacggcttgggaagcaaagtaccaaattactgatccaagtggtcaagaatttacgcaatatggtccagatatcagagataatccacgggattatttaatgggtagctgtgatgtggttgcccgtatgatccaaaaaccacagtcaggtgagcgtgggttaatcatgcagggaagtatagatacctatgctaaaaaccgcttagacgagcgaaaaggcagcaaagcagaagactttttcaaatttgaaaagtcggatttagaaaaagcggtcgataaagttaaagaaaatgcaaaggagaaacaataatgtttaacaaaaatgtaaatgaagacttaaagctaaaccaggaaatggaagacaaagttgcagaaacttgtttgaagattactaataacgaaatcaagcattttattatcattggtttagatgatgatggaaatgaaattcgaatgcatcatggtcatggcattgtattatctggtctcgttagagatattcaacgagagattgatcaagaaaatgatcataccagaaatgccagtgattttatcaagatgatgcagaaaattaataagcaagatgattaaatgtttcaattatttgattatcagcaagatttagttgataaggctagaaatgctctagcagctggaaatcaaggcgttttaattgttagccctccaggatcaggtaagtcagtagtaatcagtgaaattgctaaattaacagtaaaaaaaggtggccatgtattattctttgtccatcgccaagaactagtaaagcagatcaaagattcttttaaacagcagggtgtcgatttaaaccattgcaccattctcacggtaggtaaagtagcaaatagattaaatattttagccaaaccagatttaatcattgttgatgaatcacaacactcaagagctaaaacatatcagaaaatatttaattattattctgatgttccaaggcttggttttaccggttcaccatggcgtttatctggtaaaggatttaaagatatttattcagctatggtattaggcccaactgctaaatggttaattgaaaataaaaaactggcaccatttacagtctatggttaccagttaggtgataaatcaacgttaaaaagtggatcgacaggagattatacaaaaaaatctttaaacaattacactaagtcaattatacatggtgacattgtaaaatcatggctcaagtttgctaaagaccgtaaaactattatctattgccattctaccagctttagtaaggaagtagcacagtcttttagggatgcaggtataaatgcagttcatgcagatgctaaaactcctgaaagtaaacgtgacaagataatggttgatttcaaagaaggcaagatcaaaatattatgcaatgttgatctagtaagtgaaggctttaatgttcctgactgttcatgtgtagttctattaagaccaacacaaagcctagtaatttacttacagcaatcaatgagagccatgaggtatcaacctaacaaacacgcaatcattattgatcaagttggtaactttgaaaggtttggtttgcctgatactgattacaagtggactttggaagatcgtgagaaacatccacgcaaagatagcggtagtactgaaggattacagattaaaacatgtcctgattgttttgcagttattaaagcagaatgtgtgaaatgccctatctgcggtcatgatttttcaattgaaattagaaaaattaaacaaaagaaagatcaagaattaagagctattaaagcagaaaaattccatattgatctaatagcaaagaaaaaggttagtgaactaaccagttttaaagaattaaccatgtatgcaaaggcaaaacattataagaatggttgggcttggcacatggctaaaaggaaaggatttatttaattatgggttttattaatttaaacgaaaagacaaacaacagaagtgaactatttccaaagggaacttatgaaatgcaaattgtaagcgtccatggtgatgcaagccctagcggtcatgaaaatatgcaatttgattttctagttcgtaaagacttagacaaagtttctgcattagctaatactaatgcaaaaacacatggtcgccacttctttgcaaatgtttggactgctaaggataaagaaaccggtcaagattcaggctcatatgatccagcagatttggcaaatattgcagatgcaattggtttaactcaagctcaaattgataaatacatcaagtcaaaagaagatttgatgaaagcatgtgaaggaaaattcattagaatctacatttcagtaggtgagaatacttacaaaggtgaaactcgcaaacaaaatagtaccttcactaattcatggcaaaagactaagttcccaccacaagctgctaaaaagcaagaaactgtagaagatccatttaaaggtaatacaggttcaacagatgaattatccgaaaatgatatttcattctaaggagtgaagtaaatgggaaaatttacctatgaaaacatccctcaagaattgcgaagtttaaagcaatggggattgtttcaacttaaatgggtaaaggagcggaataaaaataccaagattcctattgatccttataacggtagagctggtaaatctaatgatcctagtacatggtcagattttaatacagcactaaaagcattagatgaaattgaacgtgctgatggcttggcattctattttactaacggatatgtagggcttgatattgatcatatttcagatgatttagcagattggcatcaaggtgatagttctgttagcaatctgataaacaaattccgtttaatgactgatgaaacttatatggaagtcagccaatctggtacaggtattcactgtatttttaagggagagattccaggcaatcgcagacgtaaaggcaattatgagatgtaccaacaagggcgtttctttgcactaactgggaacagtattggtattcctaagattgtcactctttcaaaagaaaagatgcaagctctttataatttcttatttggtgctgataaatcagtgccggataagattgaagaacctgaaattacagcgctagatttatctattcctgacatcatccaacgtgcagaaaaatctaagactggtactcgctttaccatgttcatgaagggcggctgggaacaattctataattctcactctgaagcagatatggcatttgctaatgaccttgcattttggactggtagagacttccacaaaatggatacgatttttcgtaattccagtttaatgagagataaatatgatgaaaaacgtggtgctactacttatggaatatcccttttaaataaagcaatcagtgaagccgttaatatttataatcctgagcaagatgggaaagagccagatctagtctttaactggaacaaacctaaaaaacgggctgttgctcgttcatgggatgatacaggaagaggacttagattaaatgatcagttcggtgatgtattcagatatatggcagctgataaaacttggtatttctataatggctcatattgggaattagataatggacggcatattgagttagcagctgaaaaagttgttaatttgattaaaactgaaaatcctgatttcagctttgctactcagcaggataaagataaagcaatgaaagaatggaataagttcattaaagaatcacgttcccatatggcaaaaatacacatgattgaggagtttaagaagtacgtaactattgatcacggtgtatttgatcatgacaacatgcttctaaacactgaatctggttatgttgatttaactaacggtgaattgaaagatcatgatattaaaaagatgtttagtgaacaaaccgcatcagaatattcagacaatattgattgtcctatgtggaaagacttcctagaacaaattttcaatcatgatgagaaattgattcattatatccaaaaagctgttggctactcaattacaggatcgactgctgaacaagtatttttcttgctacttggtactggtagaaacggtaaatctgtatttatcaatactatcagaaatattcttggtagttatgcaaagcagatgtcagttgagtcaatcatcgtccacaattcaagcggaagtgctaatagtgatattgcacgacttgaaaatacacgtttagttaccagttctgaagctaatgaaggttcacgtttagatgaatcgttagttaagcaattaactggtggagatagaatcctagctagatttttatatggtcaagaatttgaatatgatcctaaattcaagatttggatggctactaaccacttgccattcattagaggaactgatgaaggtatttggagaagaattaaggttgttccattcaatgtacaaattccagctaacaaagttgataagaatttggaaaacaagttaaaagctgaatggactggaatcttaaattggatcgttcaaggcgcaatcatgtggcaagtagaaggcttgaaagaccctgaagttgttcaagatgcatccaagcaataccgtgaaaacatggatccacttgaagcatttcttgatgaatgctgtaaagctggtagcaattacactatcatgggtagacctttatacaatgcatatcgtgattgggctagagaatctaatgaacatttgatgtctatgactaaatttggtagagaaatggctaagaaattgcctaaaaccaaagaaagaaatggaactcgctatgtaggcatccaattaaagaaagaaccacttcattttgattggaattaatggctgtgattagttgcggttagttgtggttggttgtggtgagtatatgtggtagctcaaaccgttggggctgtaggggtgtgacgtgtttcggttagtgtggttagtttaaaagcctatattattatatttattttcttttttataatttactttttaaagaaaaaagtagtaacactaaccacaacactacaggctgtaggcgtaagacccaccacaaactcaccacaaactggtcacatttttagccaacccaccacgattagcagtctactatattgagtgctaagaaaaataggtgacaaattggcaaaagatgtcatatcggtatttaccaattagcaatgctatacaaaaactcaccgctgatattttttgtgacggtatcagttaattcactacacttcatcagtgtggaagtcacttgagaggaaagaatatttaaatttgtgtaaatattgtgaaatcaacccaaagacaaagctaggacgcgactactacagagatgactatgttgatccagatgagattaataaggtgaatggtgaagacggaataatgtttacttacatcgattgtaaaaatcatccagctttaattatttctcatcctgatcctgagtgctattctcaggaaactgacaaaatctttataggtaattgtccctggtgtggacgcaatttaaagaaagaacatcaaaatgaacaatcataatttagctgaataccattgtgaacattgcggcagagaatttattattgctgaaattgatgatattaaacattgcccttattgcggagatatggacattgctagatatagtttgctaacgataactattgattaaaggagcatgaaaatgaaagatgaaaacggacgtgatattaaattgggtcttgaagaagctagacacataatggctacagattactgtgtaagatcagatcttgctctatgtggtgagttctttaatgaatatggtatgttgcctcaggagtacataaaggagtatggcaatgaaagtaattgataaaagaacgaagaaaactaatgaggattacaagtatggcgatattttaatgtgttgggataatgatccagatgaatataatctgtttagaatctcgactttttatgatagttattatgaacaagatcgttgtattgttgtaactatacacagtagtagtgacaatgaagcaaaaacttgggaaggattatttgactcacctaaagaagcggctagggacttaaagaatagttataaccacgctgaaaaagtgaatgcatacattgtgattactgattaacggaggaataattatgtgcgattactgtaataatgaaaaatcaattatttcaattgaagatacatacgaagatgggtacacaggtattgatagatatgaaaatggagatgtttatattaatggaaatgaattaaatttatcttgtgatgtcgaagttacttatgtatcaaagagtagcaagattaactattgtcctatgtgtgggagaaagctagaaagtgaaaattaaaaatgaatgcagtttcaaaaaaaagcatctgtccatattgtcattttgaaagtggatcagaggatccgatgaaaactttttatacagatggctgtgaattatttatcagaaaagataattcactagaagtggttcttattgattattatgatgacttttcctttaaacttgataaaaaaatcaaattttgttctatgtgtggtaggagattagataaatgattattagtttattttacagagtgaaactattttttaagcaattattttgtcatcacagttatgtatataaaacatcgctgtttagccttagcgactattatatttgtacaaaatgtgaacatgttacatataatcgaccaccgaaggaactaatgaaaagagttgaagacgaatgacatcagtttcaagtagctgctatctttgcagtacattaaatgcttttcacgatggaccggatttatatgcgccaaaaatgaatagatttcacgttaatctaaatgaaatggatggcaagtggtacttaacgattaaaggcttgccttatcctattaagtattgtccaaattgtgggcgaaaattggatgagaatgcaaaatatgaagtaactgattggttataaatgacagcaaaacaatatttcaatttaacattaattttaatgaactggttaatagtcttaatttctttttgttttaaaaatgaaaaattagatttccttatgtttatttggaccagtatatcgtttacatatttaatgcttagttaacaggagataataaatatgacaggaaaaacaattaaatttcaagcaacaacaaataatttcaaagttaatggtaataaagtagttttgcaattagatgcagacctgcttactcataagattaacttaaacaagttaaaagacattgcttttgatggcaatggagttcaagtaagtcttgaggctgatcaacaggaacttattcctgaagaaaacaaggataataagccaatgctagttagggatgacaagtaatgaaaactgcactgcttgtattatttgcaattctttaccctacgataagtgtactgaatttgttttcagattataaaaccatgaagtctaacaacgatcttatgaaagaaattcataaaagtaatgatttatttgattctttattggaagaagttcaagcaaataaaaaattaactgaagctgtgcaacataaagctactgcacaagataattttatgtgggaatcaattgtaattcttgcaaaaagaattcataacctggaggacaacaactatgttaaataataaaaaggctatttttcatgacaagaatggacgaaaaatttatccagattcattactttatgatgaagtcgctaatgagtacttttttccttatcgaaaaaatggtgtttggggtgatgactttttaggcgatttctacccacttaaagcatcacagttaatcttacagaaaaaacatgcaagtatggatgacatgaaattactgatgaaattgcctaatgaatcagacgcaattttcaacacggaagggtttatcaatggaaagtgaacatagtatacaaaagaaaattgaattagttgtctcacaacatcattgtcatatattccgtgctaatgtcggtaaaattagaacgcctgatggtagattttttactacaggcttgccgtctggctatcctgacttgcatggctggcgtgattgggatcatcaagctttttacattgaagtgaaaaatgctactggtaaaccgcgtcctgatcaaatagctttccataaaatgttgatgaaattcaatgttattcatggaattgcacgaaatactaatgatgcacttaagattgtggagaatggtttagttggctatggatatgaatagaagaggtgattgtatggaagtaacaattgacgcttatacttacgatcaattaaaagattattgtcaacgaatgaacgaaccaatgtcagtcattgctactaaagcaattaagaagtatatcgatgcgagtgactaatatggaattaactaattatcaacgtgctttagtaataattcataaattagaagatcggtttggatcaatttctaaggtacctgaatctaatcctaaaatgcaagaaatccatagacttttgccgatgggacgtcaatctgaagacaaaaactatgctcgtactgaagagcttaattatcttggctattcaaacgcacatattgcacaagttactcatcacggtcaagctacgattaattcttatttcgaaaagcatagtattaaaccaaaacagattttttactataaagttgtagcacctgatcattcaactacttattatgctgacactttaatacatttatataaaattatttttaaaaagaaaattgctaataataattatgcgaaaatacattttcttaaacagggatatgctgttcgaactggcaaaatcatttggatgaatgttatggataactcatattattgcgtgaagaattcatcaaatctgtatattaaaaatgggcttgattcttatatgaactctaaagcataaatgcttggtatagcttataatagatgtattagtaattgttattcttacctattatatggagttgattgttgtgaatatttggtctgatgtagattttgataagactgctaaccgtgttgataagttattaaaatataaacttcctagattagctaggcgatgtggacgtagtttaactgatttgtctagtcctcaattgtctagcgcttcaagtcatagtaatcgcactgatggacaagagagaatgatggttaattcttttagcattgagaaggttgttgacgcaatatgccaaacgattattaactgctcagataatagtaagctaatattaataggtaactatattaagtacatccctcaagagcaattaattatgcagctaccctatgaaaagacctactattataaagtacttaaaccaatcgcacttaatgagtttgcagatctttatgatcattggcaagatgaatgtgatgttgaacctgcagatcatattgatctgcatgtatatgtgaaagctgatgcaatttagcttatttattttttaccttgccagtgaacttttagtggacaatcactggacaaacagtgaacttcatgcggattgaaacatggcacaatatgtattgtcggatagtaaagaaaaaggtccgatgtcataacacaacaatcttagttttcttcatgttgttgtctgcattcaattgacaactaaatagacatttaagtacaacatgattaataaacacttggaagaatattttccaggtgtttttcttttgcaagcatagtgcaatggctagcacaatagtctccaaaactattaatctaggttcaagccctagtgcttgtgtttatcaaatgaaaggagccagtcaatgccacgagttcgcagatgtcgttttccaaactgtcatgagtttgcgatgatgccaaatcattattgcaagaaacacattgaacacgaaaaagaattgcaagaacgcaatgagttttatcgcttgcatcataaacgcagcaagcagtcgcaatggcgatacaatcacatcactcgctatcgtaatccggtcaagacagagcaaaacaaattctatcattcgaagcaatggcgtgagatgcgagcaatagtttttaaacgtgattaccatctatgccagtactgcaaggctagaggtcaattaaatgaaggtaacattgtagatcacgtactaccagttgaaaggtatccagaagaaatgaagaatcttcagaacatggtcaccagctgtggaagatgccactactggaaaacacgttttgaagagcaatattatggcacaggacttcatggtaaaccaacagataatccgccaataacggacgtaaaattgattgctaacttggcggctagattgaaaaatgatcacgctgtaaatggctaaaaattcgcttctaagagatttaaattttgtaagtgtaattatacatgaatcaaaaataaaaagacccccgccccgttttttaacgtctagggagccgcatccgtgtcgttttcttgtgtcacaaacaaaattttaaaagtttttgaaagggggctgaaacatgaacaaagttgatctatcaaagccgaaagtacctaatcaagcacctaaatggcttggaacttacggcaaaagattatatccaaaactagccacttatcttaataaaaacgacaaaattttaagagcagatgagtatttattgcagcaatattgttcagcttatgatgtttatcgaatagcattccaagaccttcaagagcatggaattcaacaagcaatatataaaacatctctctctcctgtggatggtaaagtggtcagtaaggatttccagggatacaaaaagaatcctgcttatcagatgatgtcagactctctctcaaagcttaatgcaattggaagggaattaggtctaagtcctaaagcacgctctgagatgctcgatttgaaggcaccaacaagcaaaaagaaatcagctaaagaaagtttaaaggagttttttggatgatgaactggattattaattatgctcaattgaaatattttgaagagatcgttggtttagtgatttgcggaattgtatgtatcgtttggtttgttttgtggttaattttatggtttaagagtcgtaaataatgaatgaactaataggcacaatatttattttaattgctttatttgcgttgattcaggaaggaaaagattaatgctttatttcaagttcaaagatagtaaatggatcaaagctaaatcaagaaattttgcatctatggtttatgagctaagctttgttagttcttttacaccttgtatgggatttactaataatgaaatttagacgatgatgcaaatattttctaaaaaagattaataaaatgttgtttttgttaataaataggagcttaatcacaaaaaaacgtgatttaatcccttattttgctcatttatattgattaggaggtggaatatgcagtgaaaattgatctaactcaaactcatgatgtgggagatgtctaccattcaattgattggaaagaaattcaagaaaaatataatgatccaggaacaaaatattgctttgatgttttagatggcaagaaacaagcaggatacaatattcagttagcttgctttcgccatttaagagacctgcaaaggcaaaacactaaagaatttccttatcattatgatgttaaacaagtagatcgacttttaaagttcgcttctatttcgcctaatgttgatactggtgagcctactaaattaatggactggcagaaatttatttttagtcaaatgatgggctggcgtgatcgagatgatgataaacgatttaccagagttattgtctctgtatcacgtgggcaagggaaaacctatttgatggcaattttagtagcttatagttttctaattgagtctttagggctagaaaaccaagattatttagttgcttccattaactacaagcaaactatgaaaatctttggctatattaaatcaatgcttagaaaaattattaatattgagccatttaaatcattagctaaagatgctggcttagagctacaatctgaacaaattattgaaaagaaaactaataatattttaagagccatttctcatgaagctggacagtatgactcatatcactttagaactgccgtttttgatgaaattggtgaagtgaatacacggcaaagaatttctaaaattatttctggtcaagttaaggttaaaaaccatcaattcgtgcagatatctactgcttatcctgatcctacagtgccattccacgaagacgaaaaaatggttattcaagctatggaacaagatttcaagcgtgaagctgatagctatctaggtttaatctggtcacaggatacagaaaatgaagtttatgatcctcaaacatggattaagtccaatccacttttaggcttgccagatcaaaaagaaaatctattgtctggtttaaaagataaacgtgataatgacttattaactggtaatattgctgattttgagaacaagaacttaaacttgtggctgaaacaatccacagctagtttccttaatctaaaagatgttgaagatgctattgataatgattttaaagttgatggtagagaggtttatattggtttcgactactcaatgtttagtgataatacagcaatcggttttgtttacccttatcaggatgaaaagacaggtgatccacgttggcacatagcccaacacagttttattccttggcaacaagctggatcaattgaagctaaggaaaaacaagatggtattgcttatcgaacttatccggaatattgtacgattacagcgcatccacaaggtattattaatccagaacaagtatataggtggctcttagattatgttcagaagcataatttgaaagtcgtcttttttggctacgatcgttttggtagttatcaggttaaaaacattactgagagtttaaatgctaacacagggtggctaattcaagatattgcacaaagaacaagtgaacttgctaatccaacaaaatttttacaagaaagttttacaactggtaagatcactcgttttgatgatccaattgaagaaacagctcttcttaatgctgttattaaggaagataagattggtattcaagtagataaggacaaggctactaagaagattgatgttgtggatgctgaaattgatgccatgtatcaggctatgtacaattttgaagattatggcttgatcaatgataaatctcatgaagttaaaagaatgacacaggaacaagtgcttaaatggtttgaaaatcctgattctggtctattaggaggtgaaacgggtgataattaaaacgctatttaaaaatatttggaagttcttagatgtaatcctttatttattgggctttggctttattgccatagctctttttttatggaataaaatagcaggttttgcaggtctaggaattgctttacttttaacaggcttattaattgatctacttccacatggtcagggaggaggtgataaataatgcccgtttttaatttgaataaaagcaatgtatcaggctacagcttaaatgatcctgaatttcttactttatttaagaacgatttatctgttagtgagtatgtttccgcagatactgctttaaaaaattcagatattttctcattgatttcacaattatcagctgatttagtactggtaaaaatgaaagctgataaagatagaacacaatcactaattgataatccttctaatctgaccaatggttttgccttttggcaagggatgtttgcacagctactgttagacggcaatgcttatgcctacagatggagaaatatcaatggcgttgatttatattgggagtttttaagaccgtctcaagttcaagtgatgctcttagaggacggatcaggattaacctacaacattaattttgatgaacctgatattcaaacaaaggagaacgtaccacaaagcgatgtgatccacatcagacttgtatcaaagaatggtggtaagactggtgtttcaccacttactggtttagctaatgaactaaatatcaaagatgcaagcaatcgtttaacactccatgctctttctcaatctgtggaagcaccaggaattttaagtgttactggtggcggtctgcttgattggaaaaagaagtcagctagatcacgtgaatttatgcgtcaagttaataactctgataatggtccgatcgttttagatgatttagagacctatcaaccgttggaagtgaaaagcgatgtagcaaaactactgcaacaagcagattggactggtaagcaaattgccaaagtctatggtgttcctgattcttatattaatggtcaaggtgaccaacaaagtaacatcactcaaattggtggtcaatatgctaaggctattaatcgttatgctggtgcagttcaaagtgaactatccaataaattgaacagccaaattacctatgatgtgagaccagctattgatgcaactggtgataactttgcatctgaaattggtgatttatcaagtaaaggaattttatcaggtaatcaaggacgctatgtattacagcactatggttatttgcctgatgatttaccaactcctgataaaccaatcattccagtaaatgaaggaggtgaagacgatgacaatagtaccagtcaaggggataatcgtgcctaatgatttaactgatatgtatacattcttaggttatgaaaatttaactcctgatgatttaaagcaatcactgaatgatgctaatggtcaagatatcacattagaaatcaattcacctggtggttacattgatgctggttctgaaatgtataccgatttaaagaaatatccaggcaatgtaactgctcaagtagttggtcaagcttgctctgctgcttcatggattgcattagcggctgataaagttgaaatgtcaccaaccgctcaaatgatgattcatagagtaagtgttggtgttgaaggtaatgtggatgatcttactagtgcattacaatcattagattcaatggatcaaacctatgttgatctttacagcaagcgaactggtttagataaacaagaaatttaccgtatgatgtgtgcgactacttggatgaatgctaaacaagcggtagataaaggttttgctgattctattatgtttgaaaatgatcaagcaccagctgtagttaatgcttatggagtgcctgttttaagtagcagtgcaattaataagatcaagacattaattcatgaaaagtccgacgatgactctaaacccattgaaaattcaaaagaagatacagataagggacaagtcaaaaaagacttgtcccttttgttatggcaatagaaagaagagaacgtatgaatttacaagaattacaaaatgcctggattgaagcaggtaataaggttactgatctctttaataagaaggtagctttacaaaagaattatgaagctgatcctgaatctgtttctgctgaagatatgaagaaggcgactgaagattacaacaaagctgttcaagctcgtgattttgctaagcaaaactatgacgatgctgtagaagctcaaaaggttaacaagcctgctaataagcctgttgaaaataagactgaagaaaagtcgaagaacattgcttcaggtttcaaggatatgcttagaaacccaatgaagtacatggaaaacttatcatcaagttcaactgctgatggcaatgctggtttgactattcctgatgatcaacaaactcaaattaacactttgatgcgtcaatatgatgacttgcgtgatttagtaactattgaaaatgttggtactgattacggtactagaaacattgaaccattctctgaaattattccaatggatcaattggatgatattcctgatgattcaactaataattcagactataagtggcaagataaggacattaaggaaggcaattacccatcagttaagcaacttagctataacattcatgattatggtgatgtattctttgctccaaatgatttaatcaatgactcaaacgcaaatattgaagcatggttaaaccaacacattgcacgtaagaatgttgttacctataactcaaagattgttggtttacttcctaactcacaaaagaaggctactatcactaagcttgatgacattattgatgcattaggtgaattggatatggctttatggggtggcgctaccttgttaactaacaagtctggtttcttgaccttagctaaggttcgtatgtcagacggttcacgtgccatgaacgttgatccacgtactcaacaaaccaccttcaacatggatggtatgcaatacattaacgttcgtgtggttgaagacagatacctttctaacaacactactgttggtggcaagtatcaaagccatccattttactttggtaactttaaggaatttattcacatgtacgaccgtcaacaaatgtcattgcttacttctaacattgctgataaggcatttagacgtaaccaaactgcgatccgtgcattgaacagatttgataccaagatttgggatgatgaggcgatgatttcaggttcatttgataaggttgaaagccaaccaatgcttatgcaagcagttactgcaccaacaagcactgattcaggtaagtagtagaaagtaggtgatcaataatgaccacttatttaaaaattgatgatgggcttaagcgctcacttggttacttgcctgatgatgatgcattggattcttcagatgaagaacgtatggaagcaacactgaaaggtgctgaaaattacgttcagggtgcaattggtgaagatgctgatgatagtttttacaaagatgattcagtgtttgagctgtataagctagctgttaatgcaattgcaactaactggtttttgcatccctctgctgctgtgtcatcaactacagcaaaacaaatcataggtcaactccgtgggacttatgatgaatcaaaggtggtgaatgacgatggtgcaacttcagagctgggacagactaattcataaaattgtgtttggtactgttgatgatactgaagatgataacggtcttccaacaaatgagtttaaacgactcgcaaaacctacactatgtggacattggggattaactactggtcaaatagttcaaaataaagggcatcatcgtgatgattcatttattgtagttattcatcacaaacgtgattatgatggtatcactcatgcaatgcttaacaataagctttatgaagtgagtgatattaatcctgatccatttcaaaatccaactgcaggagatttgatcactctcacacgagtgactgatcgtgatggttgatttagataaaggcttaaatgattggctagataaaattactaagaaagttaatctatctaccaatcaaaaagcagaaatcactggtgaaggtgctaagacttacgctgaagttcttaaaaagaatactccaaagtctcatgcaagctatgcacatgcaaggtcagctggtcatggtcgtaagtctaagcacatgagagatgccattacttataaggctggttatgaaatcaatgatggtcaaactggtgatacatctgtaggttgggaagataaatataatgcattagtcgcacggtttgttaatgatggaacacgtgatatgtctcaaaaagaaatatcaaatctacattttaaagaccatgcagaaaaagaagctgcagatgcagtactaaaagctaatgctgaaaaatttagggagatattagataaatgactactgttgcaaagcaggtagttgatcttcttaattcttccaattttcccaaattgcataaagcctactcttttgcggttggaactagcgaacgtacaccacgtgaatctgtggatgtactcgttagtgaagtggattttgattttgatgaatcaggcagtaaccaatacacggaacagatacaacgtttagcgataaacgttttttatagtaaaaaaacaacagtagacatgaacgattttgaacactcgctcatgtctttttttgtagctaatggttggcaaattgtagctagttttgcaggtcacacatacgaccccaattctggtgaaccaacaattagctttcagataaaaaggagaattacatggaacttcaaggtttaaatgatttacttgttttcaagttcgataaggacggtaagcttgttaccgatgaatcaaagggcggtttgaccaccaacattggtaaagatggtgtatttaaaattgatttggaatccagtaaaggtgctactcaagctaacatcactggtctttcaagaactgcacaagctgtttacggttctaacgcaaaggctgaacaacactttggtgcatatcaaattactggtactttcggtgctaacgacattccacataacttctatgatgcaatcgtaggtcttgaaaaggatagcaagttaggctttggtaacatggctaaagatagtactccacttgcatatggtggtgttattgctcactcatacaactcaaacgttggcgttgatctttactttgcattgccatacggtaacttgactcctggtggttacttaactatgggtactgatactgaaaacccaactttggtacacgatacattcactcttaatgccgctgcacgtccatcagatggtttagtttacgaaaaattctattcagatgaagatggatttaactttgacaagatgcttgattggattatttcaggtactgttgctggttcaggtactgaagatccaactcacaagagtgctgaccaaggtggtactggtgatctaaagaaagatcaaactacttcaacaggcactcactaataattaattagtagggtgggtagcggtggcaaattaatataaataattttgttaagaacggtgtgaaagccgttctttttctttttttgaaaggaaaatcaatcaatgttagtaaaaatcaatggtaaaaagcttcatttaactacttttgaagttgaaacaactgtaaaaaacgtacgtgcatgtttaaaggcacaaaaggtttttgcaaaattatcaattgcaattaataaggttaaagacgatgatgaccaatcaattcttgatgttttaacagcacaagaaaatcttttggatgaagaagaaaagtttttgaagaagattttgcatttatcagatgcacaagtagataagattgaagattctgctccagaagatgtaagtgaatttgttactgatttaattggaaaaatcttacaagtagacgactccaaaagcgacaacgattaatgatcctgatccagtacatgcctatgaggaaatgctggaagattttgattatcaagaacaacaaatgattgttaatgctcatatgtccctagaagattatgaaaacactgattattaccgtcttgtggaagtaatgagtgcaagaccaaaggacaaacgtccaatgagtctttgggactttgcagcaagtttagacaaaacagaaaggaggtaaataaatggcaggaagaataccagttggtacactgattacagatattaaattaaacggtgatcagcctgtaaaaacgttacgagaattaaggcaagctgtatctagtactaccagtgcatggaaagctcaagaagctgttttaagaagtgctggtaagactactgaagcggctgaagctaagtacaaaggcttatctgatgctgtaaaaagtcagcgtagattaattgatggcttagttgaaaagcaaaaatctttaaagaaacagcaagaagaaattgatacttctacagataagggcaaaaaggcttatgaaagtatcagtactgcacttcaaaagaatgctactcaaactttgaaagctactagtagattagaatcactgactaagcaacaggataaggctaaaaactctctcacttactacaagtcaggattagcagaagctcaaaagactttaaaaaccactacggctgtttcaaaatcgtatgttgatcgtttggaatctgaaggcaatcattataaagctaatgaagctagaatttctggttatagaagttcgatcagtaatttaactaagcagtatgaaattcaatcacgtgaattaaaacgtattgcatctgaatctggtgcaactagtgaagcttacaagcgtcaacagatcagagtgaatgaaacagcgacttcattaaataaagcaaaatctgctgttagtggtcttgaagcagaacaaagaaaaatcaatcctacaccatgggatagattgaaagctaagatttctagtgttaataaagaaagtcaagaaactcatagaaccttgaaagaggtattcatgggatccgcacttggtaacactgtttcaaatgctgtttctaacttaggatcaagccttaaatctgcttacacagagggtatgaacttgaatctagcaattgctaagatcaacggtaggttcaaaggcatgggtatgaataccagacaaattcaagcccttgataagcagattggtgagttaaagtccaatactgacttagctggtgattcagcatcaaacttacaagctcatatgcttaactggagtagcattggttttaaaggtgctatgcaaatggctaaaaccattgcaggtgtaggtgatagttcaaagatgactggtcagcaaattgaccaaatgtcagctggtttacagcgtgttggttctactggtaaagttacttattcctccttgagccgtattaccaaagctgcacctacctttatgcaagcactagccaaaggtgctggtatgtcagaaagcaagcttagagctttgcttaagactggtgatgtaacacaaaagcaattccaaacttggattgctaaatcatctaagtatgctggtgaaagctttaaaggttatggtcaaagtcaagctggtgctttaaaggctatgactgtagcacgtcaaaagttggaacaagaatttactaagccaatttttgatgctaagacttcaggacttcaagctttaaagaacatcatgaccagtaaagaagtcatgagcggtgctaaccaactaggtaaagcgatttcaaacgttattggctacttagataaaaataaaggtgatattgtagctatcactaaaaatgttgtttctctaggtgtggaagttggtaaggctgtttggaaagactttgcagctattatccaaaatattggtaaagctttaggtattgttaaaggtaatggtaaagattcaagtagtgcattacatacgcttgctactgctactgctgatttagctaaaaataagactgctgttaagactatatctgatgccataattgcaatggtagcaattaagggcattggtaaagtcagtggcggtcttttttctattggtaaaggtgctgttactgcttacaagtcagttaaagcattaagatcaggatttaaaggtattgagcttgctgaaaaagctactaaaggtgaaaaagcttgggctaagtttggtggcgttctatccaagacttttagcggctttagaaaagttggaagtaaaacttggactactgtagaaaaagctggcatcaaagcttggacaggtattgaaaaaggctgggttaaagcaagcgatttaggtacaaaagctggaaaagcaatagctaagggttttagagctacaggaaatgttttagcaaaggcaggcaaatggagctggagcaaaattaagtctggctttaattttgcaaaaaagtttggtcaagaagtaggcaaaaagatttcagcaggaattaaagctactactaagttctctatgggtaaacgtcttgctactggtgctttagcaggcgctgcagttgcaacacctgaagtgataaatgctgttaaggaccgtcacagtgctaatgctagaagtcaagacattggcggtgctgttggcgctgtcgctggtggtacattaaccagcatgattccagttgttggtccaatgcttgctccaattggtgcaattatcggtaaatatgctggacgttggggtggtcaagctgtcaataatttcaccaaaggttggcagcgcaataaaccgcctaagaaattctggagtttagaaaatttaggctggtcaacccatgatacttttagaaaagtaggtaagtggggagcagatgttggtaagaagtttggtcaaggattaagaaaaggtaagtcatttgctaagaaaaactctaaagaattagcattgaccgcagtttcacctttgttaggcattccagcactgctttacaagaataatcctaagttcagaaagtgggctaatggtgttggtaaaaacatcaagagtggtttaagtaaagttggtaaagcagttaaccacttcaagagttcattatccaagaactttaagaaggcttgggataatgtctataaacatagttctaaaggtactaagcagattatgcggtctgtttctcgttttgctaaatcttacataaagactaatagcaaagccaataaagaaacgattaaaaactttgcttcatttagcaaacgtttaaagaaaaatcacggtgatttgtttaagaccgttggtcaaactgctaaaaaacaacttgctattgagaaacgaagatggtcagctaactggaagaatatttcaagaactgctaaaggaatttggaatggtattcataagaatgcttctgatttatataggaaactcaattccgccacacatggtggactaggcaaagtttttagtggttttaagagtttcggcaattctcttaaaaacttctggtcgagtttattaaaaggcattcaaagtacttttagtcatgctattgataacatcaaaggtgttgccaataacgtcaataagttcttccacggaaaacttaaggttggatcacttcatttagctagtggtactgattggaagaagaaatatggctatccagctatcttaaatgatggtcatgattcaccagctactaataataaggaaggaattttaaatcctgatggttctgtggaagttcaacagggtgtgaatgtaccacgttggatctttccatggcaagacgttattaatgctcgtgatatggctaagttgtttggtcgatcagttcaccttgcaaatggtactgttgatctttatagccttgaaactaagaatcctgttaagattcttactacattaactaagcttactaagaagaagtacgatgaagaccgtttgcgtcatcaaaagcaaaaagaacgtcatgataaaaatgatagtgctactgctaatgagcgtaagcgtctgattaagcatgaacaagatgataaggctgatagagctaaagtcgctaaagaaattagagacgctctaaagcgtggtagaaataccaaaggcttaattgcacagctaaataagcttactagtcgtatcagtcaagaacgtaaagctgttgctaagaccaatcctcatcacggtgaaacgcttgtggatgaaggattgttacttggtgctaatagtcgaattggcaagtccaagtggatcagtgacgctttatttaagaaacttactactgctcctaaaacaaagaagactaaaaaacgtaagaccaagaaacgtaaatcaactagaagaagatcaacgtccatatcaagacgttcatattcatctggttcaagtcgtgtttctgtgccaagtatcagcgcttctggtgcatcacttaaaggtttaagcagtaaatctatatctgtaactgctaaggtaaaaggatctaagcagatcaaagcacttgaaaaggctatgaagcggatcaagggtggcactcacaaggttactgtaaaaaccaagggtgctaaatctgttaagtcactctctaaggcaatcaagaagatcaaaggcaaaaagagtactgttaatgtaaaaaccaaaggcactagtcaattaaagtcattgcataaaaacattaatactgttgaaaaacgtcttaatgttttagctaagactgctaagaaagataagtttggcgaacaaatttctaagcaggctgaaaaggctgttaagtcactcgaaggcaaaggtaatttcaccaagaaaatctctagcatgtctaaagcaactgttaaagatttcaagtcaatgacttcaagtgttggtaaaactactgataagatcaggaaatcaactgaacaagactttagtaatctttacaaacgatcttaccaatctgttaagagattgcacgatggtgtaatcaaattaggtactgctactgctcgtggttttggcggtgcaatgcataaaatggttggttatgcatctaattcaatgcgtgggacaatcaggcaaataaatagaggtatccgtggtattgatgctgtattaaagcaatttggtggtaatagttctgttattaatccagttcactttgctaagggtactgatgcaaacggtcgtttaactcatgacactttagcagtcgttaatgatgctcaatctggtccacgtcaagaagctgtagtaactgatcaaaatgacattattattcctcatgggaataatcgtaagatgttattgagaaaaggctggggtgtacttaacggtactcaaactcaatcactctcacttccacactttgcaaatggtactggcattagcaagaaagaacttagaaagttagcagaaaacagcttaaagcactttattgagagctttaaatcaatgtttaccaataatcttcatgatgttggttctgatttaactaaagattctactgatttgagtaaacgttctggcactcactttggtaatccatggtctcaagccatgtggacggttatcaataaagctattggttctggtggtggttcacgtgctaagttcttgcaatatgctaaggatacttttgacggtgttaagtatcaaatgggcgctgcgtcaaagaccttatctgactgttcaggtatggtaatgcaggctttacgtcactttggaattaacattggtcgtactactgtggctatgcaagaatcatcaggtgttcaatacttaggtaaaaacttatctaaaacagagcctggcgatttggtcatttttggtcatggtactggtgcagctggtcacgttggtattatcaataacccagctaagggtacaatgtttaacgaaacgccgccttatgcacgtatcagtaaaatatctgatgctatgtcaatgggctatggttactatcgtgttaaaggtcttcatgatcaatctaagcatcaacctaagattaagcctagtttgttagctttagccaaacgtgaattaggtggtaaagcacttaattggattggtgatcatttatccgaaaatgaaggtgcagttgctggtaaacctattggtgatcatgctcactggatgaaacaagctcatattcctgaaagagattgggcagatattaattacattgtttctgctgaatctggttggaatccacacattgtcaaccctagttcaggcacttatgggttagggcagatgcaaggatataacttgcattactacactaaacacggtgctaaaggtaatgccattgcccaactgatgggtatcatggattatattcatgaccgttatggtacagttgctaatgctgttcgatttagaaaagcacataattggtacgcaaacggtggtattgcaagttcaccaagtatttttggtgaagcaggacctgaaatggctgttccactgattccaagtaaatccacaagagcgtgggaattgattggtaaagctgtaggtattcttagtgctaacagcaatttaagtactaaccaacaacgtatttctaataaagatgaaaaagatgagcatgacttattacaagccatgcttttagttttgcaaaaaatgagcgctcaaagccgtgatattcatatcacacttgaaactcctgaaggtcgcaagctgtgggagttagttgagccgttctacaagcaagaccgtagacaagacatgattaaagaaagaaggggattaagtgcaagatttagatgataatgtgaagctgatttttcaagatcatgcttcaacagactttggtatggtcgttcaaaagccatgggatttgattcatccaactccagatattgatctaacgcacattaaaggtaggaatggagattttttacaaaataaccaatcttatcaaaatgtgactgaaacctttaatctgcaaatccttagaccacctgaacgtggttggtttgattgggaacgttctgtaaccgattggctctctgctccaactgatcctgatggacggatgaagtatcaatatcttagatttactgctgatcctaactatgtattcaaggcaattgtcaaagatccgtttactgttactaaagatgtaactagtgattttgttggaatctgtgctattcctttctgctgtgaaccgttccaatacagaattgacggcattgcttatattccacttcctgatagtggaattgtagtaggtgaagaaaagtggtctgctattccagattggcacttcatagcaaatggtagtttcactttgtatgtcaatgacttgccttacacgtttgagaatatggaaggtgaattttggcttagtggcgctactggtgatacttatgatgcagatggcaatctatacaatacacaaactcattttcctaaccttgatcctcctaaattgtggaagggtcagaatactatcactgttactgctgaaactggcactactatcactaaagctgaatacaaaccaaattggaggaggttgatctaatgaaattaactgtaggtaaaattcctgaagttgattatggtgactactctgatttgatgacaatgccacatctttatgacagtattgccagtgattttactagtagcggtattccacttcctgatgcaattgattgccaggtaaatggaaattccaatcagttttggtctttaactatgacttatccaagatcaggattgcaccaaaaggaaatccaacctaacaaatggattatggaagactgcgatcctaaacacgtgcatcaatggtttaagatcattcacattactcctgaactagacaatgtagtagttgaagcggaacacattagtgcgttacttgttaattctactgttgctgatgatattcaattaaacggtgcaactgcacaagacttaggcaatcaaatccttaatcaaatgcaggagcagagagaatttactttctattctgatgttaacaaagtaagtaaagtgaatattcaaggtggtcaacaagcaagcaatttgttcattgatcctgatcaggaaggtgatactgctactcaatcagttttaggactgtttggtggtgaatttgattttgataactggaatatcagacattcaaaatgtattggacgtgattctggtatcaaggttacctatggcaaaaatatcaaaaccacctttagtcaagataagaacattcagaacatgtatactggtgcagtatttgtcgctaagtatgtaccaggtcaagcaattgcgaaaaatgattggcaaggctgggctacatgggaaagtacttacgattcagtaggtatcacttacatggctggcggtaatatcaatatctatgattgtcctgtagatggtcaaaagatcattggtactttgcaaaacgggatgaaactgcacttaggtcagattgttaatgatggttcattcactcctgatggtaaatatcaaattaacactgttaatagcgatagctggtatccaattgcacaaagtgatggcggtggttggattgattctaagtggatcaattttgacacatcaggtgcttatgcaattaacaatgtcagtgggattgtaactgttaagagcagtaatccgcttgatagtgaaggcataggtagtcgtgttactgttcatggttctgctgttgtagcttacggtaaaggtaaatcaattagagtattttattcacctgaaattggtcctgatcatcatcctgttaagtcactaggtcaagactggactgttaaaaatggtactgttattgattatgacatgattgaacgtaattcaaatggtgatttgtggtatcgcattggaccacatcaatggttattcggtccacacttatcactttctgaagaaggcagctaccgtcaatacagcaactctggttatggttatgttaaagatggtgctgtaaagtatcactttactaaagaccataaaatggtgtcatcaaatacaacagttattaagcatggatcacagaaaaaggcatggaaatgggtaggcaaaggaaagcataaacataaagttactaatggttctcattggaaagaaaaagaaaagaaggtcaaagttactgctaaaaaaggaatgtctactattgataagacaatcactcaaggcggtaaaacctacatgcatacaagccatggttgggtagaatctggttcaatcaactacaccaaagacggttcagttaaaccacatagttttgacgacttcattaataatcaacttaaggatcattctaaggttgaaatttatgcaacacctgatagtaagaatgctttaaactggtcaattcctaatggcgagacattcactgttgttaatggtcatgaagctaaatctggtgatggtaagacatatgttgaagtaacttacaaaggaaaaactggatggctctgtgaagatgatattgatgacaaaaattcaaatattacatctgcagatgctgatacagataattccgctgatactgataccaactacaacgcaaatgttgatcaatctaataaagaagtgactgttaaggttggtccgctttacgctgaaggatttggtgtaaatcctaacattgatagcgttaatacggttgatattagcagctacttcaaacatgacgatcaggatttatcaggtcagcaaagtgacggtagctttgttgctacacaagctgatattgatcaagccactgaaattggtaagaactatttaattgaacacagatatggtcatatgcaagttcagacatcacttgattatcaagacatgtcagacaatgatcaagactttactcaattaagcctttatgactatgtggatgttagttttcctgattatgaaattactgaaaaagctgaagttacagctacaacgtgggactgtttagcccacgtttttttgaatgtaactttaggtgatttacctactagttatgaacacctacttgttcaagcaagcgaggacagaactaatgaaaagattacttccacacggcaagcaattgctagatcaaattcattcattggtgctgttcaccatgcattaactttgcagggggcatctcaagaacaagcatgggaaaaccttatggttcaactaggggatgcacaatacgtcactgataaaaagactggtaagcaaaaactggtgcttggagaatcagttaaagtatttgcaaagcatatgcaagaaatggctaacaacattgataattttgataatttcttaaaatcaggcggtggcggtatgcttgaacctatttcaagtgatggctctaccagttggaataatgtcatggcaattagagctaaaaacaatgatggctcttatatggaatttaatggcttaggtcttagtttccatgatatttatggcaatccacatgctttgtttggtattgatgattcaagtggtgaagtaactggcaatttctttgttgatcaagctcatatccctattttggatgcatcacacattgagactgatacaattacgagtttgggaactattaatggtgttttacacgttgaaaaccatggcatttcaattgcggttggagatgccactaatttactaaatcctagtcaggaaattggtggtttgagtttagattctcaaaattatactttgaatttgggatctggatcagtaaatattcatgataaaaatagtggtgctattacacacattggacctaatcaagcacagattggtggtaggaatgttgttgtaacaagtagtacagaatctactttaggttcatggattaagcaatattggcgaggacctagtaagtattggaatttataaaaatgaacacattagaacaatatgtagcaaatgaattgggaactattattgcaaaccaatccattaaaatagcaaaactagaaaaagaaaatcaaagtttaaggttaagaaatgctcaacttcaagacattcacagaaagaaggtgaaggaaagtgagtctaagaccgataacgttaaaaacggataaatcaataactcccgtgtcagatgacacaagggttttacgttccaccgaaaaaggtctggtgctggacgtaacaattttaaatgaagatgattcaccatacgatctaacaggtaaaaatgtttcattttcagaaattaaagagagtgatcgtgtagttgctgatgatggtactggtgagcaaagtggtaaattcaacatgattgatcgaactaaaggacactttagttatcaaatgactcaccaatgttatacagccagtggcacttgtttctttcaaattaagcaaggcgacactattgttgatactacacaagatttctattttcaagttaaagttgatccaactgttaagcctatcaatgatagttatgtaagtagtcttattgctatggaaaaccacctgctaggtgctactcaaaaaacacaagctactattgatcaattgaataaagattcaagtaatgcacaacaacaagcacaagcagtacttactaagattaacagtgattttactgattactctattaaatacaataaattatctagtgattggactgctgaagctaaatcaattcaagacgctgcaaatcagcaattagctaatcttaaaaccagtaatcaagctgacataactgcagctgttaagtcaattactgatcaacgtgatgctgctttaaaacagttaaacgatgataagactaaagcacttgctgatttacaggcagactacaacgcatggaagacttccacagctaaagatttcaatgatactgttcagccacttaaagacagcattagtgaaaatgaccaaaaacttactactgtaagtaagcaagtttctgatactgtagtgtcaatggattccttgaaacaacagtttgacaaggtagacttttccaagtttgttacaggggacaccattaaaaattactacactaaggaagaaactgatttaagactacaacaagctggtaaggtaaaatctgtagataatattcaacctgattcaaacggaaatattaatacagaccactacactaaggatcaagcaaatcaaaaacttgccactaagctgtcgtttgtcaagagtgacagccctcaagcggcttataaagcaagtttgaaaccagcagcagatggttcaccagtcattgcaatttatgacatgaatgatgagcctggtgaagctgttattgctggtcaaaaaattacaatcagcactttaaatgacgctattaaggctcttcaaactcaagtgagcggtttaagcaacttacaaagtttgattgatggtaaagctaatagcgctgacgtttacttaaagactgacatcgacaattttaagaatcagcttgaatctgaaattagcaacgctggtaagcttaaaactatcactgtaaacggtggcgcaaagataagccctgatgatagtggcaatgctaatatcactgttgatttatcaagcaaggttaaccaaacggatctgaataacactaacaacagagttacagcaattgaaacaggatatatgaaaaagcctaccgtaattagtaaagctgactacgataagcttgctactaaagatccaaatactttgtatgaaataacagaataaagaaggtgaccgtatggctttaacgataaatggcaaaaaagttctaggttatgctctaggtgaaaatgagtttcttaatggaaatggagcagaaaacctaaatattttttatattgatggtgataataacagggaatggaaccatcaatcttttactattgatatgacaaaatattttagtcaagctgatgtaaagtattcggatgttcaatattaccaaattattgtaaaggtattttatcaagatgttgacaataatactcttgaaaacaattttcgcacaccgttattgaaacgcggtgaaataaataacaagcgaagtgataatgaaggcagtcccggagctatgtcagtttggtttacggacaacaccacattagctgtccgtacaaaatccgattatgacgacactttaggctattcatatactaatctggtattggcggtgtatggctttacttctcaagatgtaggtgctggtctatagatggcagcacccaatagatattcatcgaagaattaaagctgtcgttcatgataaacgacagcgtacttaagcgatacattcgcttattttttatatcttagaaaggagtttttatatggctaatatttttgcacctggtggtcaagaattggcattagcaaaagacattgttcgacctaatttgcttgctaattctaaaaaatgtgagataagaacaccagcaggaaatatacagtttggcaaattcattaccctaaaccctaataatttaggatcaatatatttaactgatgcagcttcaaataaaggtattcacaaagacgcaactacttatttgccaatagagcaaaacacatattatgctcaaacactatggtttaccacagatgctcaagttattcttagtaattttgcttcaaattacatcttttactcttcaaatggctctcgatatctcttgtcaggcgtagaagcacatcaaattgttggcaatcaatataaagtatctggttattttaattccaagacaaatagcgactttaatcttggctatattggcaatttttctcaatgtttgaaaatcgcatcaactgctcaggttagatttgatgctttaaaagtagaaaaaggtactgaatcaacagactggtgtcctgcctatgatgattatgtaatgcaatctgatttagatgatcttaaaacacaaattgagcaattaaaatcaaaataattgaagcccacgatggctattttttatgcaaaaagcatagttaattaacactgtcgttgatattgaacgacatacttatttaaagaaaggaaaataaaatggcagaattaaatgaaaatacattttggatctctggaattattaatggagaatacagagagtgtgatggtccatataccaccacaaaggatatgagtgataaaggctatccttatgtaactaaaactccaaatccaaactttacacatcaaaagtatgactacacagctcatgaatgggtagacacttcagatgatgctttacttcacactgtggaagatgtaaaagaggctgttactgaattaaaatcaaacagtcagtcaaatactcaatcaaatgatcaacttgataagaaattagataagcttactactttggtcattatgtcaaatgttcaagtaggtgaaattagaaaagaattacaagcggttaaggctcaaaaccagtctgcagctgctactcaacctactgaaccaacacaaaacaccacaccagaagttgaaggaggtaataagtaatgtttgagatttacaagtttgaatttgataacgattttatcagtcaagatgaattaagaagttacattgatatgggcttaatcagtgaagctgaataccaagaaatcgttggtggtagcaatgaagaagctaaaccagtggaaggctaaattaacaattagaaattgtgaactgctaattggtctttttattttaggtaagggtgtttggctgtttcatgatagccactatttcatttatcctccacagtttgagaatattgaaaacagcagatacattgactgcttcctaattttgttaggaatcttgttaatgctatctgcttttttagttccgtatattaacaatattaaatacaaaatcatactaattattgctagtaaagtatttcttgtaatagttggtattgtttgtatggttttagcattattgcaattaacgcatggcatctttactacattctatcgaatggggcattcagcatggggagatctgataatttttggatttgtttatctaactgcttgtgatgcctgaaagtgggtgtcatgagtgaattggggatacattattacagcaattggtggtgtgatcagtgcaataactcttttttataaagcatttgatagtagcaagcaacaatcactcaccacactgttacggcaaaaggatgaagaaattaagcagaaagaacaggatgctgaaatctacagaagaaaatggttagatgccgaaaaagacaatgatgaattaagagagaggttaaaaaatgacaattaatcaaatcatggatttagtaatcacaatttcaagtgtagctttggtagtaattgtagctatctatactaaacataaggtagaaattgaccgtaaagctatgcaaggcaatgaacttgctaaagctgaacaattagtggctaagactgttgaaccgcttgtatatcaagctgaaaaatcaggcggtgatggtgatactaagtttactcaagtattgaacactgtacttggtattcttgatttagctcacttaccacatccttcaagccaatttattggcggtgaaattgaaaagagtgtagctgctatgaaaagaacacaaaatttgattgatactgtagaagataagccagtagaccaagataagaaggctgatactaatgcttaaaatgtgtgacgtgtactccgatagtcctcgtagttttgctacacaatcaggtacagatattactatgattaaggcaacacaaggaacgtggtacgtaaatcctgaatgtgacgtagattaccaagcagctaaaaaagcagggaagcaattaggaatttatcactattgtgaaggtggtaatcctgaagcagaagctaagtatttttacaagaatactaagaattacgtaggtgaggctgtaccagctgttgactgggaatctggtcaaaactccagttggggcaattcgaattacgttcgccgttttgtcgatgaatttcatcgacttagtggcgtgtggccgctgatttatgtgcaagcatctgcattaagccaggttgcaaattgcgctaaagattgtggtctgtggattgctagttatccatcaatgaactggaagagctggacagtgccgaacatgaaagttaacacttatccatggtcaacttacactatttggcagtttacaggtgataatatggatagaaatttagtaaatacgactaaagaaggctggaaaaagttagctaaaggtagcagtaaaccagctgctaagaaaaaatcaacttgggttaagaaatcaggtgagtttatcttaggtgaagccttagcaattcacaaagaaccccacattgattcaccagctatcgctaagcttagcaaaggtagcgtagtgaagtatgatgcaactttgcaaggcccactaagattgtggttaagacagccacgatcaaacggtaaatgtggttatatcgttgctaaagacaagtatggtaaagcactaggaaaatttagataggaggaaactccaaatatcgtgcaataagccaccttggggaactatgtccctggggtggcttttttgtgttgtcactttatataaggaagaaaaaataatttactgttgcacaaatgttgcacaaaaggtttttaacttaaatttaggtaaaaaaataagcttgcaagatcagtgatctaacaagctcttggtctattaggcacgagtaactttaccagactttaaagccttggttgaaacccatacgcgctttggcttaccgtcaacaagaatgcgaactttttgaaggtttggcttccaagcacgacgagttgagttcaatgagtgtgaacgtttgttaccgaatgtagtcttcttacctgttacgtaatcttttgccatttgctaaacctcctttaattgtgatgtcatacttaattagattatcatatgttttcgcgcaattcaatactaaaaggattttttcaggtgtattttaattattgattatgtcgttactatgataaaataataaacgtatatatagataataagacggaggacgaaacatggctgttaagatcaagacaaaagatggtttgattgatatttcaaacggtgtaatcgcaactgttgttggtggcgcagctacgtctaactatggcgttgtaggtatggcatcaaagaatgccattcgcgatggatttgacgggattcttaatcgtgccaattataagcgcggtgttgttgtcaagtcagaagataacgaaattacggttgatgtgtacattattgttggttatggtttgaagatttctgaagtaagtaagaatgttcaagatagtgttaagttcaatttgaagaatcaattaggaatagacactaaggccgttaatgtcattgtacaaagcgttaaggtacttgacgaataacacaggcggaggttttaaatagtggttttaaatgagatagatagtaagcaatttagagatatggtacgtgttgccactcatcgaattggtaaaaatgcggagtttgttaactctttgaatgttttcccagttcctgatggtgatactggtactaatatgaacttaaccattgaaagtggtgctaaggctgtttcggaaaatccaagtactagtgttagtgatttaactgaaagcttggctaaaggtatgctaatgggtgcccgtggtaacagtggggttatcacttcacaattattccgtggcttttacaaggctacccaagggatgaagaccttaactgcacaggaattagcaaatgctttttcaaatggtgttgctactgcttataaggctgtaatgaagccagttgaaggtactattcttactgtagctcgtgttgctgcacaagccggtgctactaaggccaataacaccgacgatgtaactgaagtaatgaaagctgtagttgaaggtgctaagaaggctcttaagtcaactccagatttattgcctgttttgaagcaagttggtgtagttgactcaggtggtcaaggccttttgtttatctatgaaggctttttggaaggcttaatgggtgaaaactttgcagatcaatatcaacctgacgaaaatgaaatggatgaaatgatcaatgcaatgcaccaccaatcttcagttcaaagccaattggctactcaagatattaaaaatggttactgtactgaaatcatggttgatcttgatgccgatgtgccaaataaaaagaagtttgatttggaagaatttagaaagcacttgtctggcttgggcgattcattattagctgtttctgatggtgaaattgctaaggttcacgttcatactgaacaccctggtgatgttttccaatacggtagtcagtttggtcaattaggcaagatcaagattgataacatgagaatccaacacgaaagcatcgttgaccaagatgaagaacaacaagaagcagttgattttgcagtgatcgcagttgcttcaggtaacggtattcgtaagttgtttgaaagtgaaggggtaaaccgtattatctcgggtgggcaaacgatgaacccatcaactcaagactttattgatgcaatcaagaagtctggtgcgaagaaagctattgtcttgccaaacaacggtaatattgttatggctgctaagcaggctgctgaagttagtgatattccggttggtattgtaccaactaagactatttctcagggtttaaccgcaatgctttcattcaatccagatgcatctgttgatgaaaatgtggaagctatgacagaggacttagatacggttgtttcaggtgaagttactcaagctacccgtgatactgaaatcgatgaagtagaaattcataagaatgactacttgggaattgttgatggcaagattaaggttgacaatgctgatttaattaagactactgttgatatgattgaaaagatgctggatgaagattcagaaattatcacaattatgtttggccgtgatgctagtgaagagcaagcacaagaagtagttgaacaacttgaagccaaacatgatgatcttgaatttgaaattcatgatggtggtcaacctgtatatcacttcttagtatcagttgaataacaatgattgataatgcattatttgctcctgtcacagacttaaagggtgtagggacaaagactacagctgcattaggaagcttaggcatctatagtatttatgatttgcttttttactttccttttcgttatgacgaattacaaacattaccgttagatcaaatcatggatggtcaaaaagtaatgctaaagggaatagtagccactgaagcgtttgttagtcgttttggctataagaaaacgcgcttaagtttcaagatgagaattgaccatgatgtgatcatggtcaatttttttaatcagccgtggttaaaaaataaaattgagatcggacaagaagtagctatttatggtaaatacaatgttgcccggcaaagtttaacggcctttaaattcgtagcagccaaagaaaatgatagtggtatggcgccgatttatccggttaatcgacatgttaagcaaaaaaaattagtagatctaattaatgtggctattgacgattttattgatcaagtgcaggatattgtttcggaaaagttgcggcaagaatatcgtcttttaaaagaccaagtaattattgaaaaaatgcaccaccctaagaatagtcatgaggctgaactagctaagagaagtgcgatttttcgtgagttttttatttttgaattacaattagctttattgacccgtaatgatggtaaacaaatgggttatgcaaagaaatacgatctgacagaaattgctcaattaactaaatctctgccatttgaattatcagatgatcaaaagcatgtggttaatgaaatctttgctgatatgcattctgatggtcaaatgcggcgacttttgcagggtgatgttggttctggaaaaactgttgtagccgtttatgcgatttttgcagccattacagctggctatcaggcggctttgatggtgccaacagaaattctggcaactcagcatttcaaaaaaatcgatgaattgttgcgtcctttaggtgtgcgagtagctcttttaacaggcaatacaaaaacactggagcggtgtgagatctaccgtgaattaactgatggcacgattaatgtggtaattggcactcatgctttaattcaagatagtgttatctttaaaaaattaggtctagtcattattgatgagcagcaccgctttggtgtaggtcaaaggcaagctttgattaataaaggcgatcaaccagatattttggcaatgaccgctacgccaatcccgcggacgctggctttgacagtttatggtgatatgacagtctctgaaatacatcatttaccagccggaagaaagccaattatttccacatggaaaacaagtagtcaaatgaaggaagtctatcgacaaatgcaagagcagctaaatcaaggctttcagatttacgctgtgacaccattgattaccgagtcagagacgttagacttaaaaaatgcagaagaattgcatgaaaaattaagccatgattttcctaatcacaaggtagtcctgcttcatggtcaaatgccaggtgcgcaaaaagatgagattatgactgcatttgcagctggtgagatcgatattttagtaactaccagtgtgattgaagttggagttgatgtggctaatgccaatatgatggtgatttataatgctgatcgttttggcttaagtcaattgcaccaactgcgtggtcgaattggtcgaggacaaacacaaagttattgtgtctttctagctgatcctaagaccgattcaggtaaagcaagaatgaaaattattgcgtcgaccaatgacggcttcaaattagctgaagaagatttaaagatgcgcggtgaaggtgatttgtttggtaaggctcagtcaggattgccagaatttcgtgtgggtgatgtagtaaataactacaatacattggtcgttgcgcaaaaagaagcacgagctttggttgcggctgatcctgatttattagatccaggacataaggcacttaagcaagtgctagaatataagcaattagagcaaaacagaatttagaaaagattgtggtgaatatatgagaacaattgcaattgatgcgatgggtggcgaaaatgccccagatgcaatcgttaaggcggttttacaagctaaaactggaatgcctgagactaaatttttattatttggtgataaagaagcattaagaaaactaatccctgaagatcaaattaatgatcaattaggagttgtacctacaactgaagttattgctgatgaagatgaaccagttaaggcaatcagaaaaaagaaagactcttcaatggttgtggcagctaacttcgttaaggaaggaaaagctgatgcgttgctttccttaggcaatactggtgcattgcttgcttgtggaatttttattattggtcgaatcaaggggattgttcgtccaggtttgatgcctactttacctgttcaaaatagtgacgatggcttcaatatggttgatgttggtgctaatgctaagagtaagccagaatatcttttacaatgggccgaaatggcttcgtactatgctgagaagattcgcggcattaaaaatccgcgagtaatgctcttaaataatggagctgaaagcgacaagggtgatgatgttcaccaaaaggcctatgaattgcttaaagaaagtaatttgaatttcttaggtaatattgaaggtaatgaattgctattaggcaaggcagatgtggtagtaaccgatggctttaccggaaacgctgtacttaagaacattgaaggaacctctagcgtcttgcttcatttattaaaagatagtttattaaatggcggtgtaatgaccaagttaggtgccttaatggtgaagggctcgttatcaagcttaaaatctaaatttgatacggctaaatatggcggtgcagttttactaggcgttaatgcaccggtagttaaaacccacggtagatcaaatgaacgtccaatttatttcactcttaagcaagtagataaaatggttaaagaaaaacttgttgcagattttagagacgaattcgctgaaaaatagtacaatgttttattaaaaaggagaagttttatgtcagaagaagaaatttttaataaaattaaagacatgatcgctgataattttgatgttgataaggatgagatcactgaagacactaattttatgaacgatttggatgctgattcaattgatttggttgaatttatcttgcagctagaagatgaatttggcgcagaaattcctgatgatgaagctgaaaaaattaaaacaattggtgatgctgtttcatatattaagtctcatcaaggataattttctaaaaaaagccgtgtcgtgatttgcatacgaccggctttgtgtttagaattagaaaataaatagaaaagattaaatgcttttaataaaaaagctcgagatggaggaatgacctttggagaagcagagtgatcttttattagatattcaacacctgcatacggcataccgtttgcaagggaaattctatgatgcggcagacgatgttaatctgactctgaagcgcgacgagattttagccatcgttggtgaatctggttgtggtaagagtacaattgcctcaagtatcattggattgtacgaccataaaaatactaaagtaacaggggacattctttacaatgaattaaacctagttggcttgaatgaatcacttttcaataagattcgtggggacaagatcggaatgatcttccaggacccattagccagcttgaacccattgatgcgtgttggtgatcaagttgctgaaactctttattaccacactgatatggacgaaaaggcacgtcacgcacgtgtcattgaattgtttaatcaagtaggaatgccaaagcctgaagaaatgtacgaaatgtacccacatgagttgtctggtgggcttcgtcagcgtgttgtaattgcgatggcgattgcatgtaagcctgaagttattattgccgatgaaccaacaacagctttggatgttactattcaagctcaaattttggatttgcttgaagatattcaaaaacaatctcactcagggattattttgatcactcacgacttaggtgttgtagcagaaactgctgatgaagttgcagtcatgtatgctggtcaaattgttgaaaaatctgatgtaaagacaatttttgaaaacccacttcatccatatactcgatcattacttaactcaatgcctcaatcagacgatacggatgaagatcttcatgtaattcacggtactgtgccatctttgaagaatatgccacgtactggtgatagatttgctgcaagaattccttggattcctgctagcgcacatgaagaagaacctaaggtgcatgaagttgcgccaggtcactgggtaagatgtacttgctggaagtcattccactttgaggatgaaaagacagcaagtggggagtagtttatggcaaaagaaattattcaaatcaaagatttaaaggtctattacccaattcgctctggattttggaacagaattactgattatgtacgtgccgttgatgggattaatttttcaattggtgaaggtgaaacttacggtttaatcggtgaatctggttctggtaaatctactaccggtaaggcgattgttggggttgaaaaagttacaagtggtcaaatcatgtataagggtttggacgtaactaaggcaagcaaccgtaagaagcttgattataataaagatgttcaaatgatcttccaggattcaatgtcaagtttgaacccaagaaagagaattgaagatatcattgcagagccaattagaaactttgaaaatctgactactgatcaagaacgtgatcgtgttcaagaattgttggatattgtagggatgcctagtgatgcgatctacaagtacccacatgaattctcaggtggtcagcgtcagagaatcggtgttgctcgtgccgttgctactaaccctaagttaattgttgcggatgaaccaacgtctgctttggacttgtcagttcaagcacaggttttgaacttcatgaagcacattcaacaacaatacaacattgcttacttgttcatttcacacgacttgggtgttgttaagcacatgtcagaaaacttggcaatcatgcaccgtggtcgtttggttgaattaggtagccgtgaagaaatctacaagcacccaattcacatctatactaagcgtttgctttccgctattcctcaagttgatgttgaacatcgtgaagaacacaagaaacatcgcgaacaagttgaaaaagaatttgaagaaaatcaaagtaaatggtacgacaaggatggtcgtgtatatccattacaacaagtagcacctaagcactgggtagctttgccaaaagatatggcccacgaagctaaacttgaagaattagaagaaaaggagagtgattaagcatgtggaaaacgattttacggcgtttgttaatcatgatccctcaattgattatcttgagtttgctggtcttccttttggctaaaatgatgcctggtgacccattcagtggatcaattaaccctaacaccgaccctaaacaaattgaagccttaaaacgggctgcaggtctgtttgatccatggtacgtgcaatactttagatgggtgggcaacttgttccatggtgaccttggtacaagttacattcaacatgtgccagtaacttcattgattgctgaccgtgctaacaacaccttctggttatcacttttaactactattttgacttatagtattgctatccctcttggtattacttcaggtcgtcaccaagacgaatggcaagatactagtgttagaatttttaactacatcaccttggctaccccaggattcgtattctacatcttaggtttgtggctcttcggtttcaccttgggttggttcccaatttctggttctgtttcagctagtgcctctggtttctggggcgtacttggcagtagaatctatcacatgattttgccagcaattctgtatgccttgattactactactggtactgttcagtacttaagaactgggattgttgataacaaggttgaagattacgtaagaactgctcgtagtaagggtgttccagaaagcgtcgtcttccataagcacattttgcgtaactcattattgccaatcgctgccttcttaggtaacacgattaccggtcttcttagtggttcaatgatcattgaaagtgtatttagttatcctggtatgggtaagttgttccttgactcaattgggcaacgtgactacactaccttgactgccttgattcttatctttggtatcttaactttaatcggtaacttattatcagatatcatcatgagtatcattgacccacgtattagaattcaataggaaggagagaaaaaatggctgataagaaagaaaaagctacaaagaaagctactaaaaaagacgaaaagcaaaaagcaactctcccaccttctggattcaaggtggcaatgcgtgaaattgtgcgttcaaagtctgctttaactgctctgattatcattattgtcattttactgtttacttttggaggttcattattcttgaatcgtgcccaagtaacagaaatgaatattgctgactcatactatggttggggtgaagcgggccacttgctaggtacggatgatggtggtcgtgatatcttgaagttgctcatcatgggtgggcgtaactcaatcatgatcggtatctcagtaactgtaattactgaaatagttggtttagtagttggtttggtatcaggctactttggtggtgcaatcgactcagttatcatgagagttgttgacttcattcagattttgccacaaatgccaattattattgttttgactactgttatccctaactacaatgctgtaactttggtattcttgattgcgatgtttgggtggacaacgacggcacgttacttccgttccttcgtcttatcacagcgtggtcgtgactatgttttagcatctaagacttcaggttcatctaatttacaaattatgttccgtgaagttttgccaaacattacttcaatgattattatcgacgttgtattgagtattgcaggtaacattggtattgaaactagtctttcattcttgaactatggtttaccaagtaccacgccatcacttggtactttgattggttttgctaatgacccagttaacgttattaaccgtccatggttgtggttgccagctactatcttgcttttggtaatttccttaagtattaactatgttggtcaagccttacaacgtgctggtgacgcaagacaacgtgaaaactaataaagtaataattaaattaaaacagctctatcgcttggtagagctgtttttgcatatttataactagaatcttattgaaagcaaataaaataaaaattaaaaataatttcataaaactattgaatttttaatttatggtggtattatttaatcatcaacctgattcaaataactattgaaaatgaattgtatcctagatgggggaaacaaagtatgaaattatcaaaagtattgggttcagtaggagtcgtttctgcggcagcgttagctttagttgcttgtggtaagagtagcagtaacaatgctggcgcaaaggatgccaagaagtttaaggaaactactccagttaaggcagtcaaaaagggcggcactttatcatatgctgaagaaactgatacaccttttacaggtatttttaacaatgaattatcaacttctgctattgacacagatgtagcacagtttggtaatgaatcattatttgatactgatgacagttacaagattaatagcaagggacctgcaacttttaagttggaccgtaaagctaagactatcactaagtgtataattttttacggtaagttgaataaataattaaaaaagcccaagtcctttgaatttggacttgagctcaaacaaaaagaccagtagtctgatgttaagaacaaaaaacacattagaagctggtcttttatgaattcaattgtaactgaaatcgcaaatattataaagtctgaagataattatattaagcgtgaaagaaaaataatctgtttcttcttaaacctgattaaggaaatcatggccttggctttagctaaagttgatgatgaaatgattaccaaggttaaagcacagggctatcagattgataagaagaatgagcgctcaatcaatatggcttttggcgaagttaggtatgtcagaagaagatatgtctgcccaggcaaacaagcaaggtatcccttggatgaattaatgggctttgacaaatacaagcgctacagtattttagcagtcaaaaacatcttagaagtaagcagcgttgccacttatcgcaatactgctctagcagtcaattgcctgtctggctttaatattagccatatgcaggtgggcaatttggtaaaaatggccgggaaaaatattaaagcgggccaagaagcagattcaagatatgatgccgcaggcactaagaaaaaggtcccagttttgtatcttgaaggcgatggcgtggtgatcaaaggcactaaaagccggttggaatttcatcgctatcaggtctgtgaaggcattgtcaatataagcaagaaacgcagaaagcgaatcaatgccaaggaatttgtttctttaagccgacttgatgcgctgaacgaagccaaggagtacctggccaatacttatgatctttctgatactgtaattcttagcaacgccgatggcggtgctggatatgccaaaacagacttcgatgacattgtagggctatgcaagcgtcatgagcatttcttggatgtctttcacctaaataagaaaatcaaagaaaggctatattttgcgcctgacctgcaaggcaagctgatttctgctttggaatacaaatacagctatgacaaagttaaaactatcctaaccactgcagaaagccgactaattgatgaattgaataccgagctcaatcatgattatctggggcgcctaaggaattatattgatcgtcattgggacgatattaagccgtttaagaaacgaaaactgactgtgactaaagccattggctgctgcgagagcaaccaccgcaagtatacctaccgtgttaaggggcaaggcaagaaatggtcaaaatctggagcagaaggcatgcttaggatcttaagctgcatcaagaatcgagagctggaattttggcttagcagcgagtttgaagattcagaaataactgtattgactgaacaggaattaaaagcagcggcccgtgacagcttaaagaagcgtcatgaagttcatttaggcatccagcatggcgcattaaccgcacaggtagctggcaatagttatttaagcaagctaagcagaaatttaagtcatataaatatttaagaaattaaggttagactaatggtttaaaggctaccgcaaaaacattgacacttacagactatcactattgaagttaaaaaaggtgttaagtggtaagatggtaagcaggttactgcaaaagatgtagagtatgaatatgaagttatggctaacaagggcacaaagtctcaacgttatactgcttcacttcaaaacattgttggtgtaactgaatatcatgatggcaaagctaagactatttcaggtattgatatgccagatggagcaaatggacgtaaagttgtaattcactttaaggaaatgaaacctgggatgcttcaatcaggtaacggatacttcctcgaaaccgcaagtccatatcatcaattaaagagtattccatttaataagcttgaatcatcagatgctgttcgtaagaatcctttgttctttgggccatacaagattagtaaaattgttcgtggtcaatcagtaacttgggttcctaataaatactactggagaggtactccaaaattagataaaattacggtatctgtagttaaccctaactctgcttctcaagctattaagagtcacaaatttgatattgctagagttgttaattcacaatggcaacaggttaagaacactaaaggtgttaactttgttgctaaagtaccacttcaatacagctacatgggcttcaaggttggtaagtgggaaaatggtaagaatgtcatgaacccaaaggcaaagatgaacaataagtcacttcgtcaagcaatggcctatgcaatgaacattgatgctgtggaaaagcgttatactcaaggcttaacattcagagtacctactttaattcctgaacaatttggaaattactttgacaaaaatattaagggatacaattataaccttaaaaaggctaataagttacttgatgacgctggctacaagaagaaaggtaagtatcgtgttcaaccaaatggtaagcctttgaccattcaccttgcagctatgtctggtagttctactgctgaaccaattactcagaactacattcaacaatggaagaagatcggcttgaatgttaagttaacaactggtcgtctaattgaattcaattcattctatgataaagttcaacatgactctaaagacgttgatgtattcatggctggttggtcactatctagcgaaccttctcctaacgatctttacaatgaaaaggcaccatttaactacactcgtttcgtaactaagaagaatactcagcttcttaaggacattgactcacaaaaggcatttaataataaatacagagtacaaaaattccacgaatggcagaagtatatgtttgatgaagcatatgttgtgccaacagttaatgcataccaaattgacgctgtgaatagtaagcttactggctactcacttaagccttcagatgctaactcagtttggtacaatgttggttacgctaagtaattcattaatcattagtaaaactaaactccaaaattctaaacataaacaaattccttatattaaattctaataactaactaatagaaaagacaggtatcttaatccaaatacctgtctttttcatgctattgttatgtttttgtaatagtgataaaattaaaggatcaacttgctccaagtaatggaggaattttactaatgaaaaaggcaaaactttttgctggtattacactgttatcaggtgtagctcttaccttagctgcctgtggtaagtcagaatctcattctgatgaatcaaagactgcttctaagtttaaggaagctgttcctactaaggctactaagaatggcggtactgttaaggttgctgttgaagctgataccccatttactggtatcttcaacgacgaactttcaacttcagctactgatactgaagttatgcaatatggtgcagaatcactttttggtactgatgatcactatgttttcaatgataaaggtgctgcaacaattaaggttgaccaaaaagctaagaccgtaactgttgaaattaagaagggtgttaagtggtcagatggtaagcaagttactgccaaggactatgaatacgcttatgaaattattgctaacaaagacactaagtcacaacgttacacttcaagtttagctgatttggaaggcttacaagaataccatgaaggtaagtcaaagactatctcaggctttgaaatgccagatggtgaaaacggccgtaaagcagttcttcactttaagacgatgaaacctggtatgaacacttcaggtaatggttacatttgggaagctgctgctccttaccactacttgaaagatgttaaattcaaggacttaatgtcaagtgataagatccgtaagaagccattgttctttggtgcttacaagttgcaaaaggttgttcgtggtcaatcagtaacttgggttcctaacgaatactactacaagggtaagccaaagctttcaaagattactgctacagtaattaaccctaactcagttgctcaaagtattaagtccagaaaatttgacgttactcaagtaatcaactcacaatggaagaacatcaaggatactaagggcgttaactttatcgctaaaattccactacaatactcatacttaggctttaaggttggtaagtgggatgccaagaagggcgaaaacgtaatggacaagaattctaagatgaataacaaggccttacgtcaagctattggttatggtatgaatgttaaccaagtttacaagcgctactcattcggtttatcattcagaattccaactttaattcctaagcaattcggtgattacttcgacaagaacatcaagggttacacttacaatatcaagaagggtaacgaaatcttggacaaggctggctacaagaagaagggtacttaccgtgtacaacctaatggcaagcctttaactattcgtttagctgctatgactggtagttcaacagcagaaccaatcgttcaaaactacatccaacaatggaagaagatgggcttgaacgttaagttaactagtggtcgtttaatcgaattcaattcattctacgacaaggttcaaaacgatgatccatcagtagatatgtttattggtgcatggtcattatcaagtgaaccatcacctaatgacttgtatagcgaaaaggctccaatgaactactcacgtttcgtaactcctgaaaacaccaagttacttgacgaaatggattcacagaaggccttcaaccacaagtacagagttgaaaaattccaagaatggcaaaagtacatgtttgatgaagcttacgtaattcctatagctaatagttactcaattactgccgttaacaagaagcttactggttactcacttaagccatcggattcaatgggtaatggtttccctaactggtacaatgttgcttacgctaagtaaagcaattatttaaaattacaaaagactgtttctaaattttagaagcagtcttttttctgtgacccgaaaactggtataatttataggtataaaaaggggcatttttatggtaagtacaaagtttttaaaaaaattaaaagacgattataatatcgaatttaacaatgaaaagctattagaagaagcatttacgcattcttcatattcaaatgaacatcccaatgatggaattcgcgattatgaaaaactcgaatttcttggtgatgctgtgctagaattagccgtttcgaattatgtttatcttcattatcctaagttgaatgaaggtgaattaactcgtttgagatctaatattgtccgaactgaaggattttcagaattcgccattgaatgtggttttcaagatgagattcacttgggcaatggtgaagaaaaagctggagcacgacaccgcaaaactttactggaagacgtgtttgaagctttcaatggggcacttttccttgatcaagggatgccagcagttgaacattttttgcatttaacagtttatccattgattgataagggtgaattcgatgattcacgcgactataagacagacttgcaggaagtattgcagcaagatggtcctgtgaatatcgaatacaccgttattagtgaatctcaattaccttcacactttgttgttgaactaaaaattaacggaaaagttgaatcaaaaggtgagggtcacaataagaaagcagctgaacaacaagctgctaaggtcgctttacaaaaattagaaaaataaggggatgaaaaagtgccattaacagaattagtgctcgatggttttaaatcattcgctgataagacaactattcattttgatgatggaattactggaatcgttggtcctaatggttcggggaaaagtaacattactgaagccgtacgttgggtaatgggtgaatccagtgctaagtcactacgtggaacgaatatgaaggatgtcatctttgccggtagtcaatttcgcaagccgctcaataaggcggaagttactttagtttttgataataaagagcgtgagttggcttttgattcagatcaggtctcaattactagaagatttctgcgatcaggtgacagtgaatttttaattaataatcagcaagtgcggatgcgagatgtgcggacactctttcttgattctggaatttcacctaatagcctagcaattatttctcagggtcgagttgatcagatcttaaattctcgtcctgaacaaagaagagtaatctttgaagaagctgctggtgttttgcattttaaacaacaaaaagaagctgccaaggcgcaaatggagaaaaccaaggataatttaattagaatcaatgacttggttaaagaacttgaaggtcgattggagccgctgcatgagcaaagttcgctggctaaagaatatcaatttcaaaagaagggactagatcagaaattaaaaagtctattagcttttgaaattgaggatttaaaccggcaaaaagaagaagtccaaaaagcagcagataggaaccaaatcctgttaacaaaactggataatgaagtaaaaggttcgcaaagtgctgtttctgaaaaacgggcagaatatcaaaaaattcaaaatgagcgagagcaaacgcagagtgaattattaaagctaagtgaccaattatcacagatcaatactaacttgcaggtcgcacagcaatcacaacagtttaataattcaactagggtagaaactcaacgtcaagttgaagaattgaaaaatagcttggttaagctaaaggatgaattgtctgaactgcagcggaataaaaagcaacttaagcaggagcaagatgctttacaagagcagcatgatcaattgactggtaaattgcacgatgatccagaagaattgagtaagcgactagaagattgtcgtaacgactatattcaacttttacaagatcaggctacaactaataatcagattgttaatctgaatactgaattaaaacgtagtcaggcagacactacttatcaaaatagtgatgtaagcaagcagctaaccgatgctcggactgaactggaaaagctgagaactgaaggcaagcagctgacagttaagcggcaaaaggaaaaagaaaaatttgcgcaagttaatgatcaaaataatgatttaactaaacagattaatcagattcggcaagccgttaacgcagagcgcagtaaattagagaaagttgaagcgcgacatgaagctttagtaaatattcaaaagcggcatgagggttattactacggtgtacgtaatgttttgaatcatctatctgatttccctggtgtgatcggggctgtgggtgaattgattacatttccagttgagctagaagctgcaatgacgacagctcttggcggtggcgtacaggatttgattactgaaagcagagttagtgctagggatgcaattaatcaattaaagcgtagtcgtagtggacgagctacttttttaccattagatggcttgcgtcaatatactattccacagtcaactatcactactttgcaatcttttagtggctttaagggcgtagcaagtgatttagttgaaagtaaagccgatcaagatattactgctgcgattaattatttgctgggtagtgtgattatcgttgatacgattgatagtgcaatgtcaatttcacgtcgagttaaccgctatcggattgttaccttagatggcgatgtgatttccccaggtggttcgatgactggtggtcaaagaaaccaacgtaataattcaccactgcagacggcaactgaaattaatcagttagagaagcaattacagactttacgacaaaatttggctgaagatcaagaacggttagatgagctagttactcaaggtgaaaaagttgcggctaaattgcaacaactgcgtgatactttgcaggagactaatcaagcgattaatgaagctgctatttctttccaaaatcaagaaaaggaagtaaagcggctaactgatgctaatagtttatataaatctcgagtaaaagaacaacaagatcggattgctgctttaaagaaagaaatcactcaggctaatgatcagcaggaacaattggctaagcaaaatgaagtacaaaagggcaaaatgaatgacttgcaagaaaagattaagaacttcaatagcttaagtcaacgtgtacaagaggaattatcaaagcttgatcctcaaattgcagtttatactaataagttggaaaacttagctagtcaggaaaaagaaaaaaatattcagatcactaataatcagaagcaaactgatagcttagagcagaaattaactgaattaagtcaaaatggtgaattatcagttaaaaagaattctgatttacaaacacaaaaagctgaaattaagcaaaagaatgaaactctgcaaaagaagctgaatgaacttagtgcgcaattaggacaagttgatgcgcagattaatcaacttgaccaagttgccagtcgtaattatgatttacgcaaagatgcagcaattgaacaagaagattactcagtaaagattgcgaagtttaattccgcaattgatcagcgcttgtcaactttgagtgaagagtatgccttaacgtttgaagctgctttagagcaagcagaaggcgaaaatactgaagaaaagcgcaatgaactggctaaaagcgtgaagttgcatcacatgtcaattgaagatattggccaagtaaatcttgattctattcaagaatatgaagatgtgaaaaagcgctatgactttttgaatggtcagcaaaatgacctgttaaaagctcgtgatgaccttgaaaagtcaatgaacgagttagatgaagaagttaagacgcgcttcaagagtacctttaatcaagtagcatctagctttaagagtatttttccagttgtctttggtggcggtaaagctagattggaactcactgagcctaataatttgctagaaactggaattgagattatcgcacagccgcctggcaaaaagcagcaacgtttaagtctgctttctggtggtgaacgcgcgttaaccgcaattactttgttgtttgccatgttgcaggttaatccggtaccattttgtgtacttgatgaagtagaagctgccctggatgatgcaaacgttactcgttttgcgcaatttttgcttaaatacgatatgaaaacccaattcatcgtgatcacgcatagacgagggacgatgcggcaggctgaccaactatatggtgtggttatgcaagaatctggcgtttcgcaagtattgtcggtttcattaaaagaaatgaagaataaaaatgaggtgaaatagttgggtttatttgatcgaataaaaaaatcactctttggtaaaaaagacgaagaggatgaaaacaaaaaagaagaaaaacagactgagcaagaaaatgaagctaagactgaatcagaagataatgatcaagaatctgaaaaagtagttgatgaagctaaatcgaaaactgaaactactgatgaagaagaacaaacagtagaagcacaagaagactctgaggtagaagctgaatctggtgatgaagaaaaagcagtagatttagattctaaacaacagcctgaagaagttaaagtagaagagactactgagactgaaacagaagaacaagttgaagaaactgaagtttctgatgaggagccaacagaatcacaagaacagctttatgaaaaggggctagaaaagactaacaagggatttggtgcaagacttaacgccttttttgccaagtttagaacagttgatgaagatttcttcgatgatctagaagacttattaattgaatctgacgttggctatgaaactgctgaacaattaactaatgaattgcgtgaagaggctaaattgcaaaatgctaagtcacgtgatgacttgaagcgagtaatcgttgaaaagttggttgacctttacgataaaggtggcaatagcgaagatgagcaattgacgtataatgctgaagctaaacctaacgtttacctacttgttggtgttaatggtgcaggtaaaactactacaatcggtaagttagccaaacgttttaaggatgaaggaaagtcagtaattttagctgcggccgatacctttagagcgggtgccgttgaacagctagttgaatggggaaaacgtgttgacgtacccgtagttactggtaaagaaaaggctgatcctgcttctgttgtttatgatgcaactgaacgggcaatcagggaaaaagctgactatcttttagtcgatactgcgggacgcttacaaaataagaagaatttaatggctgaattggaaaaaattcaaagaacaatcaagaagcttttaccagatcagccaacagaaaccttgcttgtgttagatggttcaaccgggcaaaatgcgcttttgcaagccaaagactttgacaagaccaccgaattaactgggcttgttttaactaagttggacggctcatctaagggtggtgtagttctagctatccgtaacgaaatgaatttgccggttaaattggttggcttaggcgaaagagctgaagacttagctgattttgatgctgcaaattatgcgatcggtcttttccacggcttggtctagtgataaagttagagatgtaaatattgttttataaggagaattttatgaaagaatatagtgcttgtactactatcttagttggtaaaaatgcctcgattgatggcaccactatgattgctcgtaatgatgacacttttcgtccaattaccccacaaaagttcattattgagccagcccgtcatggtgaaaagaaacatattaagtcatggttaaacaagtttgaaatggacttgccagaagatgcgcaacgtgtaccagctgttcctaatgttgactacaagcatcgtggctactacgatgaaagtggaattaaccaagaaaacgttgcaatgtcatgtactgaatcaacttatggtaatgagagaactttagcatttgatccacttgttaaagatggattagatgaagactgcatgcagacttctgttttgccatacattcattcagctcgtgatggtgtacaatatttaggtaagttaattgctaagtacggttcaccagctggtaactcagttttattcagtgataaagatgaaatttggtacatggaaattgttacaggtcaccactgggtagccgagcgcattccagatgattgttacgctgcaactggtaatcgagttgcgattgaacaagttgactttgataatcctgattacttcatgtggagtaaaggtattcaagaatttgttgaagaacaccatttgaacccagatcatgaaggctggaacttccgtcatatttttggtacctatactgaacaagatcgtcactacaacaccaaccgtcaatggtatattcaaaaattgttcaatcccgaaattgaacaaaacccacaagatggcgatattccatttattcgtaaggcagctaagaagatcactaaggaagatattcaatttgctttaggttcacactaccaagataccccgtatgatccatttggtaagggtacggatgaagaaaaacatcgctaccgtccaatcggtttgaaccgtacgcaaaatgctcatattttgcaaattagaagtgatgttccagcagatcgtgcggctattatgtggttatgtatcggtggtccaactttcactccatttgtaccattctttgctaatatgaatgatactgatccttcatataacaatacctcaatggattacaatatgaatgatgcatggtggtattacaagtcatttgcagctatcgttgaaagtcattacccacaatttgttcagcttgatactacttatttaactgaacttaaccgctacttcagaggtcgagttgaagaaattattgctggtgcagaaggtaaatcaggtgatgaattaactgaatatttgactaaggaaaatcaaaagactgttgcccatactcgtaaggaaactgaaaagctttggggtcaaatgatgattgaatcgatcaacatgtccaaacttactttcaatatggatgaaaatctttaataaattcaaaacagctcgaaaaagggctgttttttataatatgtgaaatgaaaggaatatagacaatggcagaaggtactattggctcattttttactaagattaacaatgaagttgaaaaacaaatgaataacgatttaaaaaatttggtattaatgctaatgaattggaaatgcttattgaattaaatcatcatcagcatggcaaaacttttgaaaagttggctaaagaattgcatgtaactaatgacaaggtcaaatctttgacaaaaaaattggctgccaaagatttgtgcaagaaatttgaaaagcaccgtgcagaaactgaccaaactattacagggatgctcagtaaagatgaaactcttggcttggttaatgtactgaaaaagatgcttaagtcgagtgaagacaataagtaatgtaaaatagtagaagtgtctgggaaaaaactaagtctcagatcatgaaaaaagaacgttgaatttttgtttcaacgctctttttgtatacttttagctccagccttgatattattaaatcatcacaaaataaaaaaggtggaaactaacatgtacaagaattatatcacaggtcaaactgctttaacacttaatctagattttgccattccggccaatcatttggctaatgtcatcagctggtttgtagattcaattccagaagatgttttagtaggcaagactgctaaaacgggccgcccagcctatcatccagccatgatgctcaaaatactgctttttgcttactccagaagagttttttctggcagaaagattgagttgatgctggaagaaaatctgccaatgatgatcttggctgaccagcaaaagatttcatatcatactatcaataattttagatcaagcagccatgccaatgaactgattaaaaagagctttatctacttcactaacctgttagaagatgaaggcttaatcaatgaaggtgctgcttttatcgatggtactaagattgaagctgatgctaaccgctatacatttgtctggcgcaaagcggttgaaaagtatcatgaaaagctgaaaggccaggcagttgaactttatgatgaattgattactaaagaagtagtcaaagaaatggaaaaagaaaaagttcaaactagtcaggggctaaaggaattagctcaagaaactgaagcagaaattaacaagctgactaaagagattgagcaggaaaacaaagccattcctggcggttcacctcgaaaagccaagcgacgtggactaaaaaagattctgcaccggctaagaaaagattatgtgccaagaatgcaaaaatatgaagaagccgaagagatctttgccggacgcaacagttattccaaaacagatcatgacgccacctttatgcatatgaaggaagaccacatgaaaaatggtcaattaaagcctggctacaatattcaagcagtcacgaccgatcaatatgtagttgattatgccatctttcctaatccgacagatttcaaaactttggagccggttttggatcaaatgaccgtgttggacaagtttgacaaaatcgtcgccgatgctggctatggcagtgaatacaattattcgatgctggaggaaaaatatccagacaagaagtactttattccctacactatgtatgaaaaagaacagaccaaaaagtataagaatgatccaactaagctaatcaactggtactacaatgaaaaagatgattattacattgatcatcatggcgtcagattcaatttcaaatattacagccagcgcaaggatcgttctactggtcaggtccgtgattttaaggtttatgaggcagacgagttccagctaacgccagaattggaacaattggctaaaacagctagcggccgccagcgccaagttcgctataatcctaactggcaatatttaaaagaaaaagcaaaagaagttctccaaagcgaagaaggcagacacatctatggcatgagaaaatatgatgtagagccagttttcggacatttgaagaacgtatttggcatgcgcagaacgcacctgcgaggtaaagagaaggtcgaaaccgatatcggaattgcctttatgatgatgaatttgaacaaatattgtcaaagaaggtggctgaagggccgatttttattgttaaaaattttaaagagaacaaaaaaacgatcaagattcttaaaaaaggaaatcttgatcgtttttattcatctggaagctagttttttcccagacactttttttatgcaaaaattattgacaaatctttaatataatattactgtattaagtaaatagaacagtaatattattagtgaaaggataaaaatgtcagaaattttaagagtggatcaagtaactaagacttatggtaaaaaaggtgagaagcaataccaagctttaaaaggaattagctttgccattgaacaaggtgaattcgttggcattatgggtgcttctggttcaggaaagacaactttattgaatatcttgtcgacgttagataagccaactagtggacatgttttagtcaataagcaagacattactgcacttaagaacaatcaaatggcagattttcgcggaaaagaaattggctttatttttcaagatttcaacttgctagataatttgactaatcgcgagaatatagccttgccattatcgcttcaaggagtgaaggcaaaggatattgacggaaaagcaatggcgattgccaaaagattgggaatagaatctatcttggacaaatacccagctgaaatttctggtggtcaaaaacagcgtgttgcttcagctcgagcattggtccataatccggcaattttatatggtgatgaacctacaggagctttagattcacaatcagctacggaattattgaaaacaatggcagacttgaataagaatgatcaagtttcgattctgatggtaacgcatgatccttattcagcttcttacgctcaaagaattttgttcatcaaagatggaaaaatcggcaaagaaattaaaaaagaaaataagaccagagaagaattttatcaagatattattgctgaattaggtagacgttagagggaggtatagacgtgctttggaaattatcactaacagggctaaaaagtcgctttaaagattatgctgttttgttttcggggctaactctagctgctgcaatcttttatatgtttatgaccattgcaattaatccagcttttcttaagggttcaatggccattgccttttcaattacccagatggtctttatttttgggatagcgctattagctattattaccctagtctatattgtttacgcaaatagttttttgcttagtatgcgtaaaaaagattatggtacttatatgatcctaggagcgagaaatagtaaaattggccgtttaatttttacagagacggttgttattggtttactcgctactgcattaggaattttaattggtatcggcttgactcaagttgtttctcagttattaatctctcaactgggtttgcagctgcataaattcttaggcttttatttaccggctattttatggacagttgttttctttgtagttttatttttcttggctgcaatttggaatcggcacaaattggtaagtactagtgtaatcaagcttttgcatgaggatcaaaaaccagttaagttacgtaataaccgaatctggaaagcaactgaagtaattctaggccttgcccttctagccattggctactgggcaatgtgggattaccatcagttgcaaattaaatcggttgaaattggttttgtcactattttggctggttcatattttgtatttgattctgtatttactacagttatcaatgctttacggaaaaataaaaagtttaaatacagtaaactgcattcttttaccttaggtcagctaaaatttaggttaggtgattacaatagagttttaactgttatttccttgctttttgctctagcattaggtgcgatcactgttggattaaactttaataatatgacagagactgctcttcaggcaacatattatgatgctgtgttgtataaaagggatgctaaagttaatcaacaacttaaaaaagttgccgttagaaaacaaacgactttgaattataaggtcaatgggaaaaagaagtttcctgttctatatgttactgaccaagaaattgctaagaaaaaaatcaaattccaatctggtcgaaagaacggcgaccaaatgaattggaagacaaagacgattacagttgcaggtgtaaagaataaaaaacaagagatgaatttccaacttgctagtttaacaccttattctgattatgaggttaaagttgtaactccagctgaatatgtgaagattcctggaaaaaaaaaacaagtaaccttgctattaatcaataactttagaagtaattttaataatattgaaaaattgcaaaagatgtcacttgaccagacagttactaaggatgcacaaggagtttatgtttctctgaataattctaaatctgctcaatatcgcttagtagcaagcgttgcgtcaggttttgaatttatgggcttcttcttaggcttagctttcttagctatgttagcttcaaccttaatgtttaaagtgctatcaggagcaaacagtgatcgtcctcgatatgaaatgttgtggaaggtcggatcaagacgtaagttattaaagagctcgattaaagcggagattggtaccttgttcgctttaccggctgtcttgggtgtgattgatgtattatttggactacaatttttcaaagggattttagctaatccatacgataaaatttggattccatttacgatctttttagtattgtatttgctttattacttaattacagtaaaactctatgaaggaattgtattgaaaaaataatggtacgaaaaaagatctgcaaaatgcagatctttttaactgtatttagattaattttatttattttgcttatttaaaattgaatgacgaacaccatagctaaagtaaatgattaagcctaaaataaaccaaataccagcataaaatttagcttggtagtcaagccctaagaagacaattaaagcagccatgaaacctaaagcaggtaaaactggataaaatggcatcttgaatgaaggatcatcaatgtcttttccttcacgtggacgcaacttataaatacctaaagaaacaaacataaaagcaattaaagtaccagctgaaaccaattgtgacaacatggagaaggggaaaaatgctccaagtaaaattgctacgattgttaatgtccataaagcattattaggtcgacgatctgcattcaacttgcccagccatttaggaagcatctcgtcacggccaaatgaatagatcaatcttgaaccggccatactcatcccaatcaaagcagtgaacatccctaaaacagcaatggtttggacaatgatggcaacaattggatgaccagcaaaccgtaaggctaaacccactggttcagcggaattagcatacttctgataaggcataattccaattaaaactaaactaactccgacaaataaagtaacagcaatagcaagtgagcctaaaatgctgcgaggcatagttttttgtggattaattgcctcagctgagttagcggcgattgaatcaaagccaatgtaagataagaaaatcattgaaacaccagcatagattccttgccagccaccgaatggaccgttagcagtcatcttgtatttcggtataaatggggtgaagttaacttttttaattgcaaaaacgccaacggcaataaagagtagaatggctaacacctttaatacaactaaggcattttcaacgcgagctgcccttgaaacaccatgaccaattaataaggcaactaacaagattgaaactaaagaaatgatatcaataataccaccgttattgccaaaggcgttagataatgacgcgggtagtttccaacctaatggtgcgattagagctctaaagttagcagaaagccccgaaccgacgaaagccaaagcaatgaaatattctgctagaagggcccatcctgctacccaaccccagaattctcctaaaactacgttgatccatgaataagctgatcctgcaaatggcattgcagcagccatttctgcataggcaaaagccactaaaccagcagcgattgctgctaaaataaaggaaatcgctactgcagggccggtatgcttagctgcaacttcaccaggtagagtgaaaattgaagcggagacgattgttccaacacctagagctaagaagtcctttacttttaatgagcgcaccaggtgtccatctttattttcatagacgcgtggatcttctttactgttcattctctgccaaagattcacaacgcaacttcctccttatgttaaaatatattcatctaattataattaaaagtacgttaaaaaatcaactattacatatttgaaattccactttttttagaaattgttatctaagataggttaatctagcactagcttatgacctttgttatactaaagactggtgaaaatcaatggatgaactaactaaaaacgaggagctaggcgatttatatgcctactatggctctttattaacccaggggcaacaatcttattttgaagactattactacaatgatttgtctctaggcgaaatagctgctaatcatcaagtatctcgtcaggctgtctatgataatctcaagcgctcaagtaaaattcttcagaactatgaagagaaattgcatatgaagcgcgacaacaatcaggttgaagatgtcttggcagatacgcttttatctttagataatggtgatagtgaagctgctaaaaaagaaataaccaatttattaaatcaattgaggggagaatagcccatggcttttgaaaatttaagtgaaagaattcaaaaagcattaaaaaatttaactggcaaaggtaaggtctcagaagaagatattaataaggctagtcgtgaaattcgacttgctttgttagaagccgacgttaactttaaggtcgttaaggactttattaaaaccattaagaaagaagcccttggcaaggaagttcaggaaagtttaaacccaggtcaacaagtaattaagatcgttaatgaacagttaacgaagatgatgggtgaagaagcagttcctttaaacaagtctaagcatattccaactatcattatgatggttggtttgcagggaactggtaagactacgactgtgggtaaattagcctatcatttgcaaaagaccgaaaaggcccgtccgctgttgatagctggcgatatttatcgtccggctgctgttgatcaattgaaacaaattggtgatcagttaaaagttccagtatatagtgaagacggagaaaaagacgtagctaaaattgttcaagatggacttgcagaggctgaaaagaacaagaatgactatgttttgatcgatacagctggtcgtttagaaatcgatgaacctttaatggaagaattagagcgggtaaagaaagtaacccatcctgataacattcttttagtcgttgatgccatgactggtcaggcggcaacagatgtagccaaaggctttgacgaacgccttgatgttacgggcgtgattttgactaagttagatggtgatactcgtggtggtgcagctctttcaattcgtgcggtaactggtaagccgatcttatttactggtcaaggtgaaaaattaagcgatttagatgttttccatccagatagaatggcatccagaattttaggtatgggtgacatgctttccttaattgaaaaagcccaacaagattatgatgctaaggaagctgaaaaagtcgctgaaaagatgcgggaaaatacttttgacttcaatgattttgttgatcaattgcaacaagttcaaaaaatggggcctcttgaccaaatcatgaagatgattccgggactatctaataatccgcaattaaagaatctaaatgttgatcaaaagcaaattgatcatactgaagcaattgtttattcaatgactcctgaggaacgagaaaatcctgatatgcttaatccaagccgtcgccgaagaatagctgctggttcaggtcgtcctgtagttgaagtcaataggatgattaagcagtttaagcaaatgcgcgacatgatgagtaaaatgtctaaaggaaatatgaagggcttgagcaatttgcctggaatggattcgccaatggctaagatggcaatgcgccgaatgaacaagaatttcaagaaaaataagaagaagcgtttacgcaaggtaaaaagattccattcttaaaaaataaactgttaaggaaaaatactttacacctgttaagtttggtggtatattattaatcgttaagttttaggaggaaattaatttatgtcagttaaaattcgtatgcaccgtgctggtgccaagagaaagccattttacagaatcgttgttgcagactcacgtatgccacgtgatggtcgcttcatcgaacaagttggttactacaacccagtttcacaaccaaaggaattgaagcttgacgaagacaagatctttgaatggttacaaaaaggtgcacaaccttcagacactgttagatcacttctttcaggtgctggcttgatggctaagttgcacgatgcaaaatacaataagtaattttgctattaattaagagcttgatgccgtgtgcttcaagctttttttatacctaaaggagaaaaaatggaatattacgatgttgctcggattttaactacgcacggtttgaatggtgaagttaaagttagtataattactgatttccctgaagatcgttttgctatagggatgcatttggcaatcaaaggtgaaacttctcaagttttaactgtggccaagagtagaccttttaagcaattttggttagttcaatttgcagagattactgatattgatcaagctgaaaaattaaaaggaaaaatactagttgttagtgaagccgaccgcggtgaactacctgaaggcgtttattattataaggacatctttgactgtgatgtcattgatgaagaatccggtaagcgcttgggtaaaatcactgatattgaatcgcctggtgctaatgatatttggctagtccatgaagataatggtaaagagtattggattcctaatattgcatcggtggttaaaaaagtagatgtagctaataaaaaagtctatgttgagttattggagggcttacgcgatgaagattaatgtattgacactttttcctgatatgtttgctcctttgcaagtttcaatgttgggacgtgggcttgaagataaaaaatgggagcttaatttagttaattttcgtaatttcactaccgatgtacatcatcatgttgatgatacgccctatggtggtggcgctgggatggttttgcaaattatgccgattaaaaaagcacttgactcgttaccatccacaggtaaggtaattattactgcaccacaaggtaaaacttttaatgaaaaaatagcgcaaagctgggccaaagaagatgaattaacctttatttgcggacattacgagggctttgatcagcgggtttatgacttggctgacgaaactgtttcaatcggtgattatgttttaactggtggtgaattgccaacaatgagtatgattgatgctacagtaagacttttacctggtattttgggcaatgcagctagtccagttgaagaaagcttttcacatgggttgttagaatatccgcaatatacgcgtccagcagattttgaagggcaaaaggtgccagagatattgactagtggcaatcatcaaaaaattgcacaatggcggcataaagaggctcttagaacaacatatttgcatcgacctgatttgctcaaagaacgagttttaacaactgaagaaaagaaaatgttggcagatattaaagcagagcttgattaagcaagctctacttgatatactattcatcgtggcgtgaccacaatgaataagtttaggggtgttccgctggcgttggtacgttgatgaatgccgaagaaggagaaaagtatattatggatccattaattcaagaattaactaaagaacaacttcgtgacgatattcctgcattccgtgcaggtgacactgttactgttcatgtacgtgttgttgaaggtactcacgaacgtattcagttgttcgaaggcgttgtaatcaagaagaagggtactggcatcggtgctacttacacagttcgtaagattgcttcaggtgttggtgttgaaagaaccttcccagttaacgacccacgtgttgctaaggttgaagttaagcgtcatggtcgtgtacgtcgtgctaagctttactacttacgtgaacgtcacggcaagtcagcaagaattgctgaagcacgtcgttaatcataacgtcaatcataaaaaaggtcagttccagtggaactggctttttttctacccaaaagttgtatataaaatgctatgatggagttatggaatgaatgaggtgaaataaatgaagttcaattgcaaatttgcacttgtggcagcaaccgtattgacagtagcacctatattatcttttcccaatatcacgactacggtacaagcaacgacgaagaaagcccaagcagctaagaatacaatccaggtaaataaagcaccaataatttatgatcgtgcaggtaattataattcgaaatatcatcaaaatatcaaagctggtactcatttaaaatatagtggcaagacttatattattcagcagcgctttgcagctgggattcctgtgccaactagtcgaattattggtggtaagctttactattcgattggtaaaggaggctatgttaaagaaagcgatgtgttaacctggcttggtaacacaaatacggtcaagttacattttcggcacaagaaaaattatatttatgataaaaatggtaaaaaattagttagctataatggtggcaagaattattttactaataaacaaaaaccaaaaattgaggtaccatactataattcgcctaagcaattatttaatattggtaagggcggttatattgatgccagccaagtaactactttgaatggcaagggaaccgtgtttttaaataataatgcacctatttatgatgcaacaggcaagcaattcaagaataaaaatctaaagcaaggcacggttttaaactattatggtaaacctaagaaagcggctgctaatactcaattttattattatcaaaataaaactaagatgactttacctgcaattcaacaaggtgatcatacttattttcagattagtaaaacacaatatatcaatgcggcagacgttgctttagtagatggtaagacgttgtgggataaaggacctgtgagtgtttctttaataaatgatgcatatgcgtatactgccaaatttaagcaaaataaaaaggtgctttatcgtgctggcgctaaactaacggttgatagaaccaaaatagaaggtgaaaaatcacctcaactttatttacatgttaaaggtaccaaaaactatctttatttgggtaatgaaaaagactatggcgcatcaccattagattatcgtcacggttcaactaatttaatattgcagacactgttgcataattagtctgtgtgtaatacttttaaactgatatcataaaggactattatcttaatagaaggtgatagccttttattttaaaaagatcacaatgataaaatggctgtatagtagtaatgatgaaaaaagattgtgaagaaattcaaccgtgaaacggttgtgaaactaagacaaaaatcacaaagctggcagatatctattactaatcttgatataaaggcatttgttattgtgaagctatttttgtaaaaaataatattaaatgtggaattagcgttagaaataatagttatccacatttgtaaatgtccccagtaaagtcgagtaaaacaaaaatttaaaagaagatggaaaaatggattatccgaaaaaactgattgacgaagtgaaagaacgatctaaaggcatgcagctagaaggaattaattctggctcgggtccccaacatcctttattaatgattgtcggtgaagctcctggtcgaaatgaaattgttaataatattccctttagcggggatgcgggtaaggaattggataaatcattgaagcagattggtctgacacgtgatcaggtatatattacatctgctgtgagaagtcgaccttttgcaatcaaaaaggtttttagcaagcgtgaaaataaagaagtaatcaaatatcccaatcgtaagccaaccaaaaaagagattctagctcatgcgcatttcttagattttgaaattgactatgctcaaccaaaactaattgttgccttgggtaatacgggattagaacgtcttttggggtctggtcataagatttcagctgaacatggtcaagtaattaaaaatacaccaattttacgtttaaatgaaactaaagacggctatatttggtcaaaagaaagatacactattttcccagaatatcatcctgccgctgttttttataatcgcaagctaacagatgatattattaaagattgggataaaatcaagccgtatgtagaaaaggaaaaatctgaaaatgagtaatgaaacttttttgattccaattagacaaaataatgatttatcggatatcgctttaaatgaattacgcatggatctagatgagcatgctttacatcaacgttattacactgatattgcttatttagcaggaaatagtcgtaagtatagtctaaatagtgtacaaaccgttgcgagtcctttgataggtaagaaaattttatttttgggttcttctgttacttttggttttggcgctttgggtgaaagctttgttgattatctttggaagcgtgatggcgttgctgcaattaaagatgcagaaaatggtacgaccttagttgatgaagatacttataagccaaacgattcttatgttgctcgttttagagaagagctgaccgaatcacaacctgatgtttttgtcttacaactttcaactaatgatgcaaatcaaaataaaaaactaggcaaaattactaatcaaaactttgacaccaaaaccattacgggagctttggaatatatgatttcaacggctcaagcaaggtggaaatgtccaattttaatttatactaatccttattttgctaatccgttatacaaacagatggttgaacgagtacacgaactggctcaaaagtgtcacgttgagattctagatttatacgatcatcctgattttcagcatcaagacgctttgtatatggctgatgaaattcatccaactcgtgcgggttatctaaagaaatggttaccattatttgaagaaaaaataactgaaattttggcataaagaaagacctagataaattatctaggtcaaaattgaaattagtcaatgttattacgatacaagctaactaccttacccaaaattgtaactttaggtaaaatgattggagccattgtatcattttctggctgtaatcggtagtgatccttttctttgtagaaacgcttaactgtagcttcattttcttcagtcattgccaccacgatttcaccattgttggcagatgattgtttgcgtacgattacgctatcaccgtttaaaatgccagcgttaatcatactttcaccgtggactttgagcataaagagttcaccagcatcactttttaagtctggtgggagtggaaagtagtcatcaatatcttcaactgccagaattggttgtcctgcagtaaccacaccgataactggaatttcctttggcttgatacctaactcttttttaccttcacgggtaatttccaaagcacgaggttttgtagcgtcttttactagccagccctttctttcaaggcgagctaaatgaccatggacagtggaagtagaagaaagaccaactgcagaacagatttctctaactgtaggtggaatgctccgtttctcaactgtatcgtaaatatattgcaaaatttctagttgctttttatcgcttgtttttcttggcatttttaattctccgtttgtatttatggtacttaatattataacctaattctaccagataatgtcaatattatcaaacaggcgttcttaagaagttatactttttttatgacataaaatagggtagactaatgagtgttaatgtgaggtggaattattatggataataaagatgcaatgagcaaagaagaagaaaaaaaggtaactgatcgaatcaacgaactttaccataagaaagaaaaggaaggcttaactccagaggaagaagctgaaagaaaagaactacataagaaatttttagctaactttagagctgcctttaagcaagatgttgaaaacatggtcatcttagacaagaatggcaaggaagttacctcagaacgtgccaagcgagcacaaagaagaaaaggacttagaaaagattaattagttctttcaaaaagttagagaactatgataagatataaatgttagttagatggaggatttaatatgaatttaggtttagcaatttttttaattatcattgcgctcttgattggcgctgtagcaggtttttacggtgcaagagcttacatgaagaagtactttaaggaaaatcctcctattagtgaagatatgatcgttgctatgatgtcccaaatgggtcaaaagccttcaaataagaaggtacatcaagtaatgaacatgatgaagcaccaacaaaagtaattaatttaattagttttgttagaaaaggcgaaggatttccttcgtcttttttgtgcacttttaagaatgaggtgaaatatgggaatatttagtaagttagggtggttttttaaggctgagaaaaaacgttatatcataggcattacctttttggcgttaacttctttagctaacttggtaccgccccgtgtattaggcttaatggccgatcaattggatcaaggtcacatctcttggggacaatatggaatgttgatcattgctgtcgtggccgctgcattcacactttatattttgcgctatttttggcgtaaacaaatttggggcggcgcagcagaattagagcgccaaatgcgttcaaagttatttgatcattttatggtgatggatcggactttttatcagcgtcatcgaaccggagatttaatggctcatgctactaatgacgtttctgccattcagaacgttgctggtgatggcgttttaacattggttgattctttagttatgggactttcaacaatgattgccatgatcatttttgttgattggcgtttaactattgtagctttattaccattaccgtttttggcattgggagcttggaaattaggtgatcacttacatgatgcttttgataagtcacaggctgcattctctaagctgaataataaaactcaggaatctgtatctgggattaaggtgctcaaaacttttggtcaagggaaagaagatactgctgcttttgacaagatggtcgatgaaacgatcaatattaataaaaaagtttttgtctgggattccttatttgatccactgggaacaataattatcggtactacgtatgtgatcacgattatttatgggggactattagtaactaacaagattttatcaattggccagttggtttcttttatcgcgtatatttctaacatggtttggccaatgtttgctattggttatttgtttaatattctagagcgtggtagtgcaagttatgaccgtgtagaaaagttacttgatgaaaggcctttgattactgatgcacatgcagatccaaatattacttctcaagatttgcaaggtgaattaaaatatgacattaaatcatttgcatatccagatgagccagatattccagttttaaagcaagtcaatttcactttaaaacctgggcaaactttagggttagttggtcgagttggtgcgggtaaaaccacaattattcaactgcttttgcgagaatttgatcagtatgatggtcaaattactctgaatggaaaagatattagaaatattcaactaaaggtattactcagtcagatctcctacgttcctcaaaataatttcttgttttcaactagtatcggcaaaaatattgctttctcttctgaaaatgtagataaggatgatattgcagctgcagccaagaagagtgatttgcatgatgatgttttgcaaatgcctaaaggctatgaaactttagttggcgaaaatggcttatctctttctggtggtcaaagacagagaatgtcaattgctcgggcattgctaaaagatagtcagattttgattttagatgatgcattgtcagcagttgacgcaaagaccgaaactgagattttgtcatcattaagaaaagagagagctgataaaactacaatgatcgcggctcaccgtttgacttccgtgatggatgctgatttgattttggttctaaaggatggtcaaatcgttgaacgtggtaatcatcaacaactattagctgcagatggatggtatgcggaaatgtggcgtagacaggaattacaagcgaaagtaggtgaagatacagatgaataataacgaagaacagcatgaatctgtttggtctaaggcgataccatttaaagagcaagttgatatttttaagcgtttaatgggctttgttaagcaatttaaatttgaaatgattgttgctttagttggtgcatttattgttagtgtaattaatattcttttgccacgtggcttgcaatatttcttagatcactttctattgcatcaaagcacaacagtgcaggtgattttgtttgcaggttttctttatgctttaggctcaattttaaaggcaataattcagtttacttaccaatatttctttgctttaggatcagaaaaaacgctagagagtgtcagaagggcattgtaccgcaaactgcataagctagggatgcgctattttgatcaaactcctgcgggctcaattgtttctagagttactaatgatacgatgactttgagtaattttttgacggtgctatcaacttttgtgattggtgctttttcggtgattactgcgttagtagcgatgtttactactaatatagttgctgggtggttgattttactctttattccgattttattattagttgtttggctttattcgcaaaaaagctcacgtctttatcgtaattatcgtgagcgtcttagtcgaattaacgctaacttaaatgaatcaattgaaggagtatcggttatccaagaatttaatcaagaaaaacggatgactaataattttgaaggcgaaaatggtggtttaatgaatacacgcttcaacatgatccgagtaaattcattgttattatcgccattgacatcgctgctttattcgttagctttagccatttcattaatgtactttggttttccattacgtgaaacttttgttccagctggtgtagtctatgccttttcacaatacatttcgcaactttttaatcctatttcaactgtgatggatcaaatgacctttttccaagatgggattgttgcaggaaagcggatttttcggattcttgatgatacccaatatgaaccacagcaggatgctcaaaaaggattgacgattactaaaggaaaaattgagtttaaacatgtaagcttttcttatgatggcaagcatgaaattttacatgatatttctttcgtagttaatccaggtgaaactttaggaattgttggtcatactgggtcagggaagagctcgattattaacgtgatgatgcgtttttacgaattcggtcaaggtgaaatcttgattgatgacgttaatattcgtaaatatcctaaagaagaattaagaaaaaaacttggcttggtattgcaagaaccgtttatgttttatggagatatttcatctaacattcgtttgtataataatcaaattactgataatcagattaaagacgccgctaaggcagtccaagcggatcgctttattgaaagaatgccgggtaagtatcatgctaaagtgattgaaggcggagaagaatttagtcagggacaaagacagttaatttctttcgctcgaactttagtcacagatcctaagattttggttttagatgaggcaacagcaaatgttgataccgagactgaaactttgattcagcaaggactaaagcggctgagaaagggtcgaacgacattagctattgctcaccgtctttctacgattgccgatgcggatcaaattattgttttagacaagggacgcataattgaacggggtacgcatgatcaattgcttgcacaaaagggttattactataatttgtataccttgcaaaataatgaaaataaaaactaattgtttttcaggacgtttgtgtagtagcaacgtctttttttgatataatagttaaaaagtattaaataattatgaatatttataaggagcaaaaatgaaaagatattttacagttcgtggtggagctggcgacgtttctaagccagacttaaatgctaagccacaagataacttatacttggctgttaactcagaatggctatctaaagcagaaattcctgctgataagacatctgctggtgtcaattcagagcttgaccaaaaaatcgaagatcgagtaatgaaagactttgcggacattgcggcgggcaaagaaaagatgcctgagattaaagactttgataaggcagttattttgtataagattgcaaaagattttgctaagagggatgcagaaaaagctaatcctattcaaaaggatttacaaaaattaatatccttaaataattttaatgattttaaacaaaaagctgccgatttgtttatgggaccatatgctttaccgtttgtatttgacgtcgatgccgatatgaagaacactgatgtaaacgtactccattttggtggcccaagcacattcttaccagatactacgacgtatcaaactgctgatgctaagcaacttttggatactcttcaagaccaaagtattaacttactgacaatgtccggtattggtaaaagcgaagcacgagtttatgttgaaagcgctttggcctttgatcaaaaattagctaaggtagttaagtcaactgaggaatggtcagattatgccgcaatttataatccagtaacatatgctgactttattaaaaaatttaaatcatttgacatggctgatttcatggattctattttaccggttaagccagatcgaattatcgttatggaaccacgttttctcaatcatgctgaagaattattgaatgaagggaattttgctgagattaaaggatggatgctagttaaatacattaacagcgtagctaaattattgtcacaagattttcgtgaagctgcgtttccttttggtcaagcagttactggtacgccacaattgccatcacaaattaagcaagcttatcgtttggctaatggtgcttttgatgaagtagttggtatcttttatggacaaaaatattttggggcaaaagccaaaaaagatgttgaagacatgatccaacggatgcttaaggtatatgaagaaagaattaatgctaataaatggctttctgctgaaaccaaaaagaaagctgtgattaagttaaaggcgttggttttaaaaattggttacccagacaagatcgaagaaatctttgacttattacaagttgatccgaaaaagagcttgtatgaaaatgaagcggcaatgtcaactgtacgaacgaaatatatgcttaataagttaactaagccagttgaccgttcagtttggctaatgccaggtaatttgaataatgcgtgctatgatccgcaaagaaatgacttaacctttccagctggaattttacaggcaccattttatgacattaatcaatctcgtggtgcaaattatggtggaattggtgcaactattgggcatgaagtatcacatgcatttgataatagtggagcaaaattcgacgaacatggaaatatgaacaattggtggactgacaaagattttgctgagtttaataaacgagttggtcaaatggttgatatttttgatggcttacaatatggtcctgctaagattaatggtaagcaggttgttggtgaaaatattgctgatctagctggccttgcttgtgtagttcaaactggggaaaatgatggggcggatttgaaagatttgtttgagaattatgctcgtagctggatgcagaaacaacgccctgaggcaattaagactgaagttcaaacggatgtccatgcgccacaaccaacgagagtaaacattccggttcaatgtcaaaatgcattctatgatgtatttaacgttaagccaactgatggcatgtggcttgatccagaagaacggattactatttggtaaaattgaataaaaaaatagtcactggatttcaatttctagtgactatttttgatatgtaattatttatcaagcatatatttacgagtcatcggtaaagttttacctgatggtccctttgtcaataggtattggataacgtcgatgttaccagactcgaaactagcagcacaagcattaaggtacatatcccacattctacagaatctttcaccaaatttcttttctacttcaggacgaacggcattaaagttcttatcccaaatttccaaggttctttgataatgacgacgaagagtttccatatcagtaatttgtaggcctgaatcgatgatgtcagtaacaatttctggtaagcctggtaagtagccaccagggaaaatatacttgtttaaccaagcattagtggcaccaccttgttgacgggtaataccatggattaatgcaacaccgtctttgttaaggtacttgtagacatcagcaaagtatttaggtaagttttctttaccaacatgttcaaacattcccactgaagtaatgtaatcccatttttgatcaccaagttcacggtggtcttgtaatctaacttttgcgacatcttgtaagttatcgtcgtagattcgcttttgaactaatttaaattgctcctcacttaaggtaacaccggtgacttttaaaccgtattccttagctgcagtaagcatcagagttccccagccacatccgatatcaagtagggtcttgcctttttgtgggtggagtttgtttaagatatgatgtacttttgcaatttgagcttgttcaagatcatctttattgccatcttcgaagtgggcgcaggaataggtcattgttgggtcaagccacatcttgtagaaatcattaccaatgtcgtagtggctttgaatatcttcttcgctttgcttttccgtgtgtttttgcttaggcataaacttacggaactcagaagcacgcatgaatgaatcagcactttcataagcaccaacaagcaatttttggatattaccatgaatttcgatttttttatccatgaatccttcgcccaaagctagagaagcatttcgagtgatttcactcattggaatcttttcattaaaaacaatttcaatttcaggatcaccattgccataaacttcgctcttaccgtcccagtaggttaccttaacagaaaaggggaaagatttactaagcatcattttgtaaaaagttttttctaacaattgctttttcctccaatatttaaaacctaaaaattattttaacacttatattaaattgcacaggtaaagaaaaatcagtataaagcaatatttgttttatactgatttttacttatttagcaacgtagtggaaatttggatccatttccttatctaatttgttccaagcatcttcaagttgttgaaataaaatttgttcattttcatgggttagtttagttttacgatcaatggtaattggatcaccaaagttaacttctaatggcttgcgcttaagcagtcctttaaaagttaaagggccttggtagacaacaggtaccattggtttttttgacattttggaaattaataaaactccaccttttaattcagctgaatgtcgcgtgcctgaaggaaagataattaatgataactttccttctctaagtcccttaactggaatctttaaggctgatggtccagggttatttcgatcgactgggaaagcgtgagcatgatcaagaataaatcgtaaaaccggatttttgaataattcaattttagccataaacatgaattccattggactagcacctagtgcaaaaagcagtggttcccaccatgtacggtggggggctactaaaatataattgccctgaggcaagcgatccttatgatgaatgtgtagatgaccgtttaacacccaaacgatgaaacggacaatcggacgtataattttgtaaaacattgtctcctcattgattccttcatttgatgtaagctattataaaaatataatgacgagaaaggcaaatatttttatggtagatctgaaagataatgagcgaattgactacatgtatagcgataatcttcgtattattcaagataaaacggcttttagtttttcaatggatacattatttttagcatattgggctaaagacttgatccgtgataaagataaggttgctgatttatgtgcaggaaattgtgcagctacaatctatatggcttattttaatcgtgcccattatgatgcaattgaaattcaaaacgaagtttattctcaagcagttcgttcagtcaagcttaatgagatggaaaatcgtatttcagtttttcaggataatgtgctaaatgcaggacattttttgcggaaagatagttatgatgtagtaacagttaatccaccatattttaaagcacctaagggacatgaagttaatccagatcgtaaaaaagcaattgctcgccatgaacttttgattaatttagagcaaataattgaagtggctagtggcttacttaaaatgaaaggcaaaatgttaatggtacatcggccagagcgcttaggtgagattgcttattattgtatgaagcatgacttaagcatcaaaatggtgcagccatttgtgccacatcgcggtgaagatgctaatttaattattgtagaagccgtcaagcatactggaactgatggaactgttttgaaagatgctgttgaagttcatgaatcaaatggcgacttcactccattagtacagcgaatctcacgagaaactgcagatgacaaagctaaacatgaagcacagggtaaatattacttttatgtcttactgtgtaatgatggcagtttttatggtggttttactaatgatttagaacatcgtttgaaaatgcacaatttaggaaaaggagctaagtatactaaaacacggcgtcctgtacggatgatttatcatgaacagtttgacgataagcgtttagctttgaaacgagaatattggtttaaacatcattcacgtgcttggaaggaaaaatttttgcatgagcataatataaagttttaatccttgcatactgtaatcttttcttgtagaatatttgagtatgctgtgtcagcatatgaaacttaaaacacatcaagagcaatcatcatcgtggtgcccagggtagtggttagatgatgaaatgaacgcttgagaggatataaaaccataggaggaatttaaatatggcagacgttgttacaatgaagcaattgcttgaagctggtgtccactttggtcaccaaactagaagatggaacccaaagatggctccttacattttcactcaaagaaatggtatctacatcattgatttgcaaaagactatcaagatgttagatgatgcttacaactttatgaaggctgttgcccaagacggtggcgttttcttatttgtaggtactaagaagcaagctcaagattcaattgctgaagaagcaactcgtgcaggtcaatactacgtaaaccaacgttggttgggtggtactttgactaactggtcaactatgcaaagccgtattaagagattaaagcaattaaagcaaatgtcagaagatggtacttttgatgttcttccaaagaaggaagttgctctcttaactaaggaaatggacaagcttgaaaaattctttggtggtattgaagatatgccaagaattccagatgtattgttcgtagtagaccctaagaaagaaaagattgctgttcacgaagctaacattttgggtatcccagttgtagctatggttgataccaacactgatccagacccaatcgacgtagttattccatcaaacgatgacgctattcgtgctattcgtttgattgctggtgctatggctgatgctgttgttgaaggtcaacaaggtcaagatgatgaatcagttgaagttgacttcaaggaaaatgcagacggttcagaagaaatcgttagcgctgaagaaaacccagaagactagattttactattagttccgtaggaggatctattaatggcacaaattactgcaaaattagttaaagaattacgtgaacgtactggtgctggcgttatggacgctaagaaggcattagtagaagttgacggtgacatggataaggctgttcaataccttcgtgataaaggtatggctaaggcagctaagaaggctgaccgtgttgcagctgaaggtttaactggcgtttacgttaatggtaatgtggcagctattactgaagttaactcagaaactgactttgtttctcaaaacgacaagtttgttaacttggtaaatgaagctactaagactattgctgaaggtaagccagctgatatggaagcagctaaggaattgaagatggctgatggtactactttagaccaatcattcgttaacgcaactgctacaattggtgaaaagattgttttacgtcgttttgctttagaagaaaagaatgacgaccaagaatttggtgcttaccaacacaatggtggccaaattggtgttatcactgttttagaaggtgcagatgctgcaactgctaagcacttggctatgcacatcgctgctatgagccctaaggttatttcaccagacgaattagatgatcaatttatcactgatcaattagctgtgatgaaccacaagattgaccaagacaatgaaagtcgtgcattggtacataagaaaccattacctcaccttgtttacggttcagctaagcaattaactgatgatgttttggctaaggctaaggaagacatcaaggctgaacttaaagaagaaggtaagccagaaaagatttgggacagaattattcctggtaagatgcaacgctttattgatgataatactcaagttgacaagcaatttgcagtgttatcacaagactacattatggacgatagcaagactgttggcgaatttttgaaggaaaaaggcgctaagttagttgctttccaacgttacgaagttggcgaaggtatcgaaaagaagcaagaagacttcgctgctgaagttcgtgaacaaatgaagtagtcattattacataattatcatagaaaggaggagtacaccgtgtgctccttctttttttgtaaaaattttgtagtgttttaagtgttaaaagacattgcggcattagatatggtagaataattaaagctattagaggaggtcattatgagtcaagttaaatataaacgtgtcattttaaaaatatcaggtgaagctttagcaggtgacaagggtacggggattaatcctactgtaattggtcacttagctaaagaaatcaaatcagttcatgatttaggtgttgaaattggtatcgtctgtggtggcggtaacatgtggcgtggtgaaactggcgctaagttgggtatggaacgtgctcaagcagattacatgggtatgttagcaactatcatgaatggtttagctttgcaagatggtcttgaaaaaataggtgttcctactagaatgcaaacttcaattgaaatgagacagattgcggagccttacattagaagaagagctttgcgtcaccttgaaaagggtcgtgtagtcatttttggtggtggtactggtaatccatacttctcaactgatactactgcagcccttcgtgcagctgaaattggtgctgatgtaattttgatggctaaaaacggtgttgacggtgtttactcagctgatccaaagactgatccttcagcaactaagttctcagaattaactcaacttgatttaatttcaaaagacttgaaggtcatggatagaactgcaagttcactttcaatggatactgaaattccattaattgtctttaacgttaatactccaggcaatatcaagaaggttgtattgggtgaaaatattggtactgttattagaggtgataaataatgaataacgaaactattgaaaaagcaaaaactaaaatgacggattctattaaggtttatcaaaagagattagcttctatccgtgcaggtgttgctaacgctgctcttcttgataatgtccaagtagaatactatggggcaccaactccattgactcaaatgtctagtattaccattcctgaaccacgtgtattgcttattactccatatgatcaaaattcattagatgatattgaacatgcattgttggcttcaaacttaggattaactccggcaaatgatggtaaggtaattagattagtaatccctcaactcactggtgaaagaagagaagaaattgccaaagaagttggaaaatttgcggaagaagctaaaattgctgtgagaaatgttcgccgtgatgccatgaatactttgaaaaaagatgaaaagaatggtgatattactgaagacgaacaacgtaacttagaaaagcaagtacaaaaagtaactgatgatgctgctaagcagattgaccaacttgctgatgaaaagcgtaaggaaattactcaaggttaaagatgagtaataaggataatgaattaaatcatttagccattattatggatggtaatggacgttgggcaaaaaagaggcatagacctcgttttgttggccatcgagagggaatggataatgttgagcggattactttagctgctgataaattaggaattaaagttttgacactttatgctttttctactgagaattgggctcgtcctaaagaagaagtagcttacttaatgaacctccctgttcgcttttttgataaatacatgccaacattgatggaaaataatgttaaggtaaatatcatgggctatttggatgaattgcctgaaaagacttatcgcattgttcaacgtgcaatgtcagagacggccaataatacaggcttaattctgaattttgcttttaactacgggtcaagaagagaaattacgtctgctatgcaggagctcggtggaatgattgaagctggttcactaaaaagcgaagaaattactgaaaaaatgatttcagaccatttgatgactaaaaactttggtccatatcaagatccggatttattaattagaacgtccggtgaacagcgaatttctaatttcttattatggcaattagcatattcagaacttgcctttagcgaaaaaaattggccagattttgatgaaaatgatttaaaaaaatttgtagaagattataagcaccgtaaccggcgctttggtaaagtagacgaatcggatagttaaatatgaaacaacgtacaattacggcaattattgccttatgtctttttattccaattgtgctcgcaggtggcctttggatggattggctgactgtattattcgcagcagttggcattagcgaaatctttttaatgaagaaacaaatcttagtttcttttaattttttgttagccttacttgcaactttaacctggacagttccagactcattctttaaagtatttccttcaaatatcactaaattaggtgtgttttatggaattattatgttgttcttgacctggactgttctttcaaagaataaaaccacttttgatgatgtaggtgtatatattttggctgcactttacattggaataggttttcactatatggcagccattagagcatacccacaaaacggtttagcattgctgggttgtgtttttgttgttgtttggtccactgatatcggtgcctacatgattggacgtaagattggaaaacataaattatggccagttattagtcctaataaaacatgggagggctcgatcggtgcagttgtttgtgccttaatttgtagtgccatctatatggcaattcttggcagcttgggtattaactttggtgtatctgaattaacgatgattattctggcctttttcttatcaattgttggtcaaatgggtgatttagttgaatcagcttacaagcgtttctatggtgtgaaagattccggaaagattttgccgggtcatggtggtatcctggatcgctttgatagtatgctgtttgtattgccagtagtggctacaattttaggtattgttcattaggagaattttttattgaagggtatactaatctttatcgtcgtctttggtatattggtatttgtccatgaatttgggcattttatcgtagccaaaaagtcaggtattttggttagagaattctcaattggaatgggtccaaagctttttcaaattagacgtaaccccaccacttataccattcgttggttaccacttggtgggtatgttcgtttagcaggcgctgacgatgaaagcaagctggatcctggtatgacggttgttttacaattgaatgaacaaaatgaagtagtgagaattgatgcttcagaaagcgaaataccaattgaaggaattcccgttcaagtaacaaaggctgatctagtagacgatttaataattaagggttacgaaaatggcgatgaaaatgatccagtaacttatcacgtagctcatgatgcaactattattgaaaaaaacggaactgaattaattattgcgcctcgagatacacaatttaatcaagctaatgtttggcaaaagttggcaactaattttgctggaccttttatgaacattcttcttgggtttgtagtatttttaatctggacatttacagttccaggtccagcaacaactacagttggatcaactcaggctaattcaccagcgcgtgatgcaaaaattgtgactggtgatcagattgtggcaattaatggacaaaagattaataattttgatcaagtgtcacagcagattaatcaaagtaaaggcaaggtcttacactttgaattaaagaaaaatggtcaaattaggaaagttacagttaagccaaaagctcataaaattcaaaaacaaacagtttatcaaattggtattgtagctaagagcaatgagaatgcagttgttaaattaaaacgtggctgggatacagctatttcaactaccggtctgattttcagagccgtaggtaacttatttagccactttagtttgaataaattatcaggtccagttggaatttattctcaaacttcacaagtttcacaaatgggctttacttatgtattagcctttttaggaatgatttcgattaatttgggaattgtcaatttaattccaattcctgggcttgatggtggtaaacttttattgaacttaattgaattagttcgcggtaaaccgatttctgaagaacatgaggcaattgttgaattaattggtttcggcttattattagttttaattattgcagttacaggtaacgatatctatcgctattttattaaataattatattttttactttaggagataagaatgcgtcaatcaaaattttttatgccaactttgaaggaagcaccatcagatgcagtggctgaaagtcataagctgatgattagaggtgggtatattcgtcaagtcacagctggagtttatgcttatcttccattaggctaccgtgttttacgcaaggctgagggaatcattgaacaagaaatggataaaattaatgttccagaaatgattatgcctcatttacttcctgcaactttgtggcaagaaagtggccgttacaagaaatatggtgcagaaatgttcaagttaaaagatcgtcatggacgtgaaagcttgcttggacctacacatgaagaaacttttaccgaaattattgctaagaacttaaagagttacaaacaaatgccacttgctttgtatcaaattcagactaagtttcgtgatgagaatagacctcgttttggccttcttcgtgggcgtgaatttgtaatgcttgatggttacagttttgctgcaactcgtgatcaattggatgaacaatttgatgatcaaaaaaatgcatataagcgtatctttaaacgtgccggtgttactgttcaccctgtaattgctgactcaggtacaatgggaggtaaaaactctactgaatttcaagcccctgctgctatcggtgaggatacaattgctactaatgaaaaaggaacatatgctgccaaccttgaaatggctaagagtattgatactttcaagcaagaaccagaagatgctaagcaattaactaaggtagctacgccaggctgcgatacaattgaaaaattagctaaattcctcgatgtaccagctactagaattgttaaaagtattttatacattgctgatgaccaaaaagttttagtattaatccgtggtgacaagcaaattaatgaggttaagttgggtcatatccttgacgctgatgaggttcatgaagcaaatactgctgatttaaaggaaatcactggtagtgaaaagggtggcgttggtcctgttaatgcagattgggctgataagattattgcagatgaaactgttaagaatctttacaacgttgtagttggtgcaggtgaaaccgattatcaatttgaaaatgctaacttagaccgtgatttcaaggtggatgaatttgctgatattcggactgctaacgaaggtgaaccagatcctgttgatcatttaccgcttaagttcactacttcaattgaagttggtcacattttcaagttgggtacttattacactaagaccatgggtgcagatttcttagatcaaaatggtaaagcaaagcctgtcatcatgggttcatacggtattggcgttactagaatgttatcagcagctgttgaacaacacttaactgaacgtggtgttgcatggccaaaggaaatcgctccatttgcaatacatattgttcaaatgaagatgaataaagaagatcaaactgaattagctgaaaaacttgaaaagaaattcagtgaaaagtatgatgttttatacgatgatcgtaaagagcgtgctggtgttaagtttgctgatgcagatttagtcggtgcaccaattagaattacgattggtaagaaggctgctgatggcattgttgaagttaagcgaccaactgatgacaaagcaaccgaaatgtcaattgatgaattagataagtttgtaaatcaagagttaggataatttttgtggcaaataaaaacgatcttttcttaaaattgctcaaacaggttcaatttcctgatagttttgaagacaatgcgcttctacaaaaagggaaaattgaaaacgtggatgtttacgctaaagaacacaggtgggatatccacgttttttttgatactcccttgatgtatgacacctatgtagcattaagaaaagctgtagaagaaactttttcttcttttgtaaatgtaagattttatgttggaacagctgatggttctgatcaatatttaccagattattggcattatgtagttcaaaattcaaatattttgcaacctgtggctcgtgaatttttggctggccaaaaacctaaaaaagttgatggccgctgggttattccagttgataataatgtgattgatggtttaattgagcagaaggctttagatgatttagctgaaaagatgcgtgattatggcttctttaatttgaaatttataactcagctggatcagacaagttctaaaaacaatttagaaagtttgcaggagttgcaacaagagcatgaaaaaagcatgcaggaagtctttgagaagacgccagacaaacctaaaccgcaacaacctaaacagtatccaactagacgtactaattatggtaaacgtaaattagatgaaaatgctccaattacacaaattaaagagctggaagatggcgtacgtaatgtagtaattgagggaaatatttttaatgttgaaactcgtgagcttaaatctggtgcaatcattttttctggcgaaattacggattatagtgattcaattgcatttaagaaatttgtttctaataaagatgaaattgaagagctatctgcaattaaaccaggaacttgggctaaaatgcaggggtcagttgctgatgatcaatatatacatgatgtagtttttaatattagtagcttagagactgtcgagcatgttgggcgaactgaaaaatacgaaggtgagcctaaacgagttgaactacatgttcatactaatatgagtcaggttgacgcaactaatactccgacggactttattaaaactgctaagaagtttggacaaaaggcaattgcgattaccgatcatggtgatgttcaatcattccctgaagcatatagcagtggtaaagcactggacatgaaaatattgtatggtgtagaagctaatatgattgatgatcatgctttactagttttgaatcctgcaccgatgacctatgaagaccgcgagtttgtaatttttgacgttgaaactacggggttgtcatctgtttacgacacaattatcgagattggtgcggttaagatgaagaacggagaagtgcttgaacgctttgataagttcattaatccgcaccatcctttaagtgagcaaactattaatttgacttcaattacagatgaaatggttggcgcagccgatgatgaagcagttgtcattaagcaattccaagacttttatggcgatcgaccactgtgtggacataacgttcaatttgatgttgggtttgttaatgcagcattaagacgtgcagggctaaaagaaattactcagccagtagttgatacacttgaagtatcgcgtttactacatccagagcagagtcgccatactttagattcattagctaagaagtataatgtttccttggaacaccatcaccgggcaaatcaggatgctgaagcaactggctatttaatgtttaaattgttagatgcttttaataaaaagtatcatgaaaataatttgaataatttgaatggctatgcagcacatggtgaagtttataaacgagcccgtccttcccatatgacagttttggcaaaggatcaagctggattaaagaatctttacaaattagtatcaattgccagcacgaaggactttttccgtattcctcgtacgccgaagtcagatttggctcgtttgcatgatggtttactttatggttctggttgttggcaaggcgatgtctttatcgcaatgatgcaaaaaggttacgacgaagcaagagaaaaagctaaattttatgattatcttgaagttcaacctccagcaacctattcgcaattaattgctgatggtttgattaaggatgaagatcaattacatgaaattattgaaaatattattaaattagggaaggaattaaataagcctgtagttgcaactagcgatgcccactacgttgaccaaaaggacgctatttatcgtaaaatcttgattgcggctcagagatcaaaccctagtcgaaataagccacagccagatttgcatttctattcaacacaggaaatgctagatgcattttcattcttaggcgaagatgtggctaagaaaattgttattgacaataccaataaaattgctgatgaattgtcagaaattcagccaattaaagatgggttatacccaccacatattgaacatgccgatgaagaaatgaagaagttgacctatgataaggcttatgaattatatggtaagccattaccgaagattgttaaggatcgaatagatttggaattaaattccattatttcgaatggttatgcggttatttacttgatttctcagcgtttagtagctaagtcaaataaagatggctatttggtaggttctcgtggttctgttggctctagtctagtagcaacgatgtcaggaattactgaagttaatccgttagctccacactatcgttgtcctaactgtaagtattcacaattctttgaaaatggggaatatggttctggttttgacttgcctgataaagattgtccaaaatgtggaactccattagttaaagatggacaagatatcccatttgcgactttcttaggatttcacggcgataaggttcctgatatcgatttgaacttctcaggtgactatcaaccagtagcccataattttattcgagtaatgtttggaccagataattcatatcgtgctggaacgattgcgactgttgcggataagactgcttacggttatgctaaacactacgatgaagagcatgatttaaagctaagaaatgcggaattagaccgtttggcagctggtgtccgtggtgtcaaaagaactactggtcaacaccctgcaggaattgttgtagtgcccgatgatatggacatttacgattttacgccggtatcgtatccagccgatgatgtaaatgccgcttggttgattactcactatgacttccactctattcatgataatattttgaagtttgatattctgggacatgatgatccaactatgattcgtcacttgcaggatttgtctgggattgatccattgactattccacccgatgaccctggagtcatgtcattattttctagtcctgatattttaggtgttactccagagcagattcaatcagaaactggaactttgggtgttccagaatttggtacccgttttgttagaggaatgcttgaggagactaagccaacgacattttctgaattattacagatttcaggtttgtcccatgggactgatgtatggctaggaaatgctgaggacttaatcaatcaaggaatttgcaaactgaaaaatgtaattggttgtcgtgacaacatcatgatggacttaattcactggggcgttaagccagaagttgccttttcaacaatggaatccgttcgtcatggtcgtggcatcagcgatgaaaatatggctattttaaagaaaaataagaatattccagattggtatattccttcttgtctgaagatcaagtacatgttccctaaggctcacgctacggcttacattttaatggctctacgaattgcttggtttaaagtatattatcctgaaatctattacacagcttacttttcagttcgtgccgatctatttgatttggttgcaatgagtcatggtaagaatactgttaaggctgcaatgaaggaaattcaggataaaggaaacgatgcatcagctaaggataagagtttgatgaccgtgctagaaatagctaatgaatgtctagaacgagggattaagatcaaaatggttgatattgatcaatctgaagcaactgactttaagatcttagataagcatacaattttagcaccgttcaatgctgttcctggtttgggggataatgcagctaagcagattgtagctgctcgtgcagaaaagaagtttttgtctaaagaagatttagctaagcgcggtaaagtatcacaaacaattatgaattatttcgaagaaaatggtgtcttggaagggatgccagatgaaaatcaattatcacttttctgatagttaaattttacaagatcaggtaaaacatggtatactacgtatgaagttcgaataggtaaattcgagtgagcagtgatgctcactctttttattacggaggaaaatttttgtctaaagttatagattctgttcgtccagttgtcgaaacaattattgatgaacatggtgacatgttggttgatatggaatacgttaaagaaaaagggcaaaattatttacgcatttatgttgatcgccaaccaaacggtattgacattgatgagattgcagctttaagtgaacttgtttccgaaaagctggatgctcttgatcccgatccacttccagatccctatgttttggaattatcatctccaggggcagaacgaccaatcaaaacaaaagctgattgggaaaaagctctgaatgattacattcatgtcggtctttatcaaaagattgagaataaaaaaatgtatgaaggtacactcaagtcttataatgatgacgaagttgtattagaaataaaagataagacaagacgaaaaacattaactgttccccgtaagttaattgcaaatattcgttttgcaattgaattttagaaaggttgatcaaaaacttatgtctaaagaaatgctagaagcgtttgctactttggaaaataccaagggcattaagcaagatattattgttgatgcaattaaagccgctttggtagctgcatacaaaaagaattataatcaagcacaaaacgttgaagttgattttgatgaaagaaaaggtaacttcaaggtaatggcagttaaaactgttgttgacgaagtgcaagatgaccgtcttgaagttagtttaaaggatgctttaacaattaatcgtgcttatgaagtaggcgacgaaattcgttttgaagtaacacctaaaaattttggtagaattgccgcccaaactgctaagcaagttatcatgcaacgtctacgtgaagccgaaagaaaacatattattgatgaatattcacaatatgaagatgaattggttactggtaccgtggaaagacgcgacaatcgtttcgtttatgtaaagattggtaatgttgaagctgttatgcctcaccgtgatcaaatgccaaatgaggtttacaatccccaagaccagattcgtgtactagtaactcatgttggctccgatagcaagggtgcacaaattacagtctcaagaactgctcctgacatggttaaacgattgtttgaacaagaagttccagaaatttatgatggaaccgttgaaattgtttcaatcgcacgtgaagcaggtgacagaactaagatggctgttaagtcaaatgatcctaacatcgatccggtaggtacctgtgtaggccaaaagggtgctcgtgtacaaaatgtagttaacgaacttggcggtgaaaatattgatatcgttaagtatgaagaagatccatctgactttattgctaatgcattaaatccagcagaagtgattgcggttcaatttggtgatgatgaagaagaaaaaagtgctttagttatcgtaccagattaccagttatcacttgcaattggtaagaaaggtcagaacgttcgcttagctgctcgtttgacaagctataagattgatattcgtcctgaatctgaagtagaatttgtagatgaaaaaacaaatgatacagctgatgctgcagatagtagcgaaacttctgaaaatgttgaaagtacagatgacgctgctgacgttgaaagctcagatgatacaactactgtagaagattcaagtaaagaagataaaactgaagaataggtgattttttgaaaaaaagaaaaatcccaatgcggaaggatttattaaccgatacaatgcagcccaagaaggaattagtacgtattgttatcgataaagaaaaaaatgtgtcagttgatccaacaggtaaaaaggctggtcgcggcgcatatgtttcccttgatccaagtaagattgaagctgctaaagagaagaatgtattagaacgtagtttaggtgcgaaagttccagatactttttacgatgagctttactcttatgttgatcatcaaaaggcaagaaaagaattatttggtgataaataagattgcaaaatagacaaaaagcaattaatttgttaggtttagctgagcgtgctggtaagttaactaccggtacagagacagtcattaatgaacttaataagcacaaaatcaaagcggttattatggctagtgatgttcaagacaacacggcagaaaaagtaaaccgcgctgccagaaaagacaatattcctatgataactatgtttactgccattgaattgtcaaaggcaattggcaaaaaacgcaaagttttaggattaactgatgctggttttgctaaggcgttagttaaaaaaataaatgaaggagtgtgattggatggcaaagaaaagaatttatgaaatcgcaaaagaagtcggcgttgataacaaagttgtagtccaaaaagcaaaggatttaggcttagatgtaaagaatcacatgtcatcagtagatgattcacaggttgcaaagttaaagaatagtttccaaaactccgctcctgctgcaaaatcttctaataaaaagaataaaataaaaatctctgtttcttctattcgcaaaaatgaaaagaagcaagaagataataatagttctaagaattctaagagacgcaataataaacgtcgttcaaataatcacggtcatgagaataaaaatgatcgtagaaataatacaggtaagccaaaggcagctgctttgttacaacaatttaaacaaaagcaacgggcagaagaagggcaacttaatcgtgaagcccaaaaagccagaaaagaatatcatgagcaattaagacatccaaaacaagaacagccagtgaaagataataagaaaacaagcaaccacaaagataacaagaagaaagcagaaccagtagaaaagaaagttattggtcctaagattttaaagccttctccagctcgtttgaagaagcaacagcctgaagcgactaaagaactagttcaagttactattcctgaggctcctaaggaagaaaaacgcggcaataatcgtggtcgcaacatgggaaagccaggacgcaagggtaaaaatcaatttggcaatggtcgtagtgaccattcagatcgttcagagagaaagcggcgtaagaataaaaaacgtcaacaagagcaaaagccaaagaaaacacttactaagcgtaaggaacgtccattaccagaaacattagtttacgaagaaggtatgaacgctcaagatattggtaagttaattcaccgtgaaccagctgaaattgttaagaaactcttcatgcttggcgtgatgactaaccaaaaccaatctttggataaagatacaattgaacttttagctgctgaatatggtatcaatgctgagcaaaaagttcatgaagacatctctgatattgataatatctatgacaagagaatggaagagtcaaaggaatctaaaaaccaggttaaacgcccaccagttgttacaatcatgggacacgttgaccatggtaagaccactttacttgatcgtcttcgtcatactcatgtttcagctcatgaagctggtggtattactcaaaagattggtgcttaccaagttagattagatgatcgcttaattacattcttggatacaccaggacacgcagcattttctaacatgcgtgcacgtggtgctgaaattactgatattgttgtactggttgttgctgcagatgatggtgtaatgccacaaactgtagaagcaattgaccatgcaaagagtgctaatgttccaataattgtagcaattaacaagatggataagccaggtgcaaatccacaacacgtaactgaggaattaatgaaatacaatttgattcctgaagattacggtggtgatactatcttcgttaatatttcagctaagacaggtcaaaatgttgatgacttattacaaatgatcttgttgcaatctgatgtgatggaacttaaggctaatccaactgaaatggcaattggtactgtgattgaagctcgtttgtcacgtggtcgtggacctgtagcagacgttttaatccaacaaggtacacttaatgttggtgacccgattgttgttggtaacacttttggtcgtgttcgtactatgactaatgatcgtggacgtcaagttaagaaggctacaccatcagaacctgttgaaattactggtttgaacgatgtgcctgaatctgctgataagttagttgaatttaaggatgaaaagaccgctagaagtgttggtgaagctagagcacaacaagctttacaaaagtctcgtgaaaatgttcaacacgtaactcttgataacctcttcgatactatgaagaaggaaaacatgaaggaagttgacattgtcttgaaggctgatgttcaaggttctgtagaagctttacaacaatcgcttgaaaagattgaagttgaaggcgtacgtgtaaatatcattcactcaggtgtaggtgccattaatgaatcagatgtaactttggctggtgcatcaaatgcatttattattgggttcaacgttcgtccaactgctactgctaagagccaagctgaaaccgatggcgtagatattcgtctttacagcattatttacaaggctattgatgatgttactgctgccatgaagggtatgcttgaaccaacttatgaagaaaaggttatcggtaatcttactgttcgtgaaacttggaaggtttctaaggttggtacaattgctggttccttcgttgataagggcttggttaagaatgattctaagattagagttattcgtgatggtatcgttaagtatgatggtgaaattgcttcacttaagagatttaaagatgatgttaaggaagttaagcaaggtaacgattgtggtttaacgattaaggactacaacgacattaaagttggcgacgaattcgaagtttacgaaatgcaacaagttgagcctaagtaattactattaggaggaaaacatgaagcatagaattggtcgtgttgaaggtgaaattctacgcgaattaaccaagattttacaaaagaatattcgtgatccgcgcttaagtggtgtaactattaccgcagttgaatgtacgaatgatctttcatatgcaactgtttattacagcctgctaactgaagatgagcataaggaagaagaggttcaggcaggttttgaaaaggcaaaaggcatgatgcgtcatttgcttggtcaaacattaactgtttataaggttcctgaattaatttttaaacgtgataattcagttttgtatggtagtaagattgaccgtttgattgcagaagttaagaaacaagatgctaagcgggaaagcaaataaaaaagagggcgccgtgatggtgccctttttttgttgaaaagaatagggaataattatgttaaacggaattttagttattgataaagataaagggatgactagtgcagatgtagtttatcatttgcgccgcgtattacatattagaaaaataggacatgctggtacgcttgatcctgaggtgacaggcgttttaccaattgctattggtcaggctactaaattaattgaaatgatgcatactaggccaaaagaatatattggcacgggactatttggttatagcacagatagttatgatgcaactggaactgttttaaaagaaaaaaagttgattcagcctttttctggtgcagaaattcaagaaaatatgaataaatttgtaggagaaattgttcaagtgcctccaatttattctgctgttaaagtgaatggtaaacatctttatgaatatgcgcgtgaagagattgaagtcgagcgacctcagagaaaggttgaagtcaaacaatatgatctaactaaagaaccagtttttgatataaatactgggcaagaaagctttgattttaagattaaatgcagcaaaggcacttatgttagatcgttagttaatgatctaggtgaaaaattagattgccccgcaacgatgacttatttgagaagaacagctagttctggctttgatattacacaagcagtaaaattaaaggagattgaagagaatccgaaaaaggccactgaacttatacagccgattgatgcattttttaaggaatacactcaggttgatttaactgaagaaaagtggcttaaagttaaaaatggagcgggtatttcgcttgaaactaatgcgaaaaaagttgcactacgatacaataaaaaggtgaaagcaatttatgaaaaaaaaggaaagctttatcgcccaagcttaatgctgttgcaaaatgaataaatgaaatgaaggaattagctgtgaaaatcgttcatttaacatatcctgttaaggaaaatattttatctactagaattgtgcttgcccttggcttttttgatggggttcatttgggacatcagcgcttaattaatcaggctaaagaaattgcattacagaagaaattgtcattagttgtgttgacctttgatcgacatcctaaggaagtttatgagtcgaaacgagattttaaatacttagaaactttggaagaaaaagctaacaaaatggcggaattaggagtagattatttggctgttttaccatttactaaaaatttcagtcaaatttctgcacaagaatttgtcgataatgtaattgtcagattaaatgctgataccgttgttgctggctttgattacacttatggttctaagaatattgcaaatatggctaatttaccccaattttccaaagggcgttttaatattgtagtgatgccaaagcaaacttttaacggtagaaaaattggctcaactgaaattcgtcaagcaattaaggatggtcagatgaaattagccactgaattaatggggcaccattatgtaatgagtggtatcattgggcatggtaaacgaaatggtcataagctaggctatccaacagctaatttgatttgggcagaacataaggtgattcctaaaattggagtttatgctaccaagactaaagtaaatggtaagtggtataactccatgactagcgttggctataatgtaaccattaatcaggacaagaagatatatattgaatctaatatttttgattttaatgaagatgtctatggtaagccaatgaagatcaaatggtataaatataccagaggtgagaaaaaatttgccggattacctgaactgaaagagcaacttgaacgagatgagcaagaaattagggcttattttaagcaaaagggttaagaagctacgtactttgaaaaaagtgcgtattttttgaataaaattagcaatctacttgatttagtgctaatttctggtatcatattaactgttagcacctgagagatgtgagtgctaaaagtgagggcgatataatatgttgaccgagcgtcaagagcttattttaaaaacaataattacagactttacacaaagtcatgagccagtaggctcaaagaccgtaatgaagcagttgccaattaaagtttcaagtgcaacgattagaaatgaaatggccgtgttggaagagcaggggttaattgaaaaaactcactcttcaagtggtcgaattccttcaagcgagggctatcgttattatcttgataatttagttgagccgttgcaattaccagagtctgtttataatacaataggaagccaattagatcgaccttttcatcaagtaaatgaaattgtacaagaagctgcacgaattctgtcagatttaactaactataccgcatttgcggaaggacctgagagtcatgatgttagagtcacaggatttagaattgtaccgctgtctcaacgacagattatggcaattttggttacaagtgatggtaacattcaaaatcaggtatatgctttgccacataatattcacggcgaagaaattgaaaaggctgtccgcatgattaatgatcagttagtcggaaagagcctaaatgaaatcaacgtttcgttgctaagtgaattagctaaaaacgaattaggcggcgaacatgtgactgaattgcttagtttagttgaagatgtcgtaaaagatgcagctagtgagcagatgtatgtggatggacagattaatttgctcaataatacttctgaacatgatgtaaatgacattcgttctttgtacgagttgattgatcataataatctgttcactaatttaatggatgcaaaggtggatccaaagtctggaaattattcagtaaaggttaagttgggatctgaattacccaatgatttattaaaaaattatagtttgctgacagctgagtacagcgttggctcccatggtaaaggaactattgctttacttgggccaacgaatatgccatattcacaaatgattgggttgcttgaatattttagaaatgaactagctaaaaagttgcttgattattatggcaagtttcaataaaggaggttagccgtgagtaaagaagaatttccaagtgaaaaaaatctagagcaaaaagaaaagacttctgagcctaaggctaaaaaagaagccgataaaggtgaagaaaagaagcaagaaaaaaataaacaagatcaaaaattagctaaagaattagctgatttaaaagataagaacaaggatcttgaagataagtatttgcgtagtgaagcagaaattcaaaatatgcaaaatcgctacactaaagaacgtgctcaattaattaagtacgaatctcaaagcttagcgaaggacattttgccagcaatggacaatttggaaagagccctaagcgttgaggccgatgatgatgtgtctaagcagttaaagaagggcgtgcaaatgaccttggatgcacttgtgaaggcaatgaaagatcacggtgtagttgagattgaggctgatggcgttaaatttgatccgacattacatcaagctgttcaaacagtagcagctgagaatgatgatcaaaaagatcacgttgttcaggttttacaaaaaggatatcaatataaggatagaacactaagaccagcaatggttgtagttgctcaataagagaggaagctaatatatgtcaaaagttattgggattgatcttgggactactaactcagcagttgcagttcttgaaggtaaagaaccaaagattatcactaatccagaaggtaaccggactactccttcagtagttgcatttaaagatggtgaagttcaagtcggtgaggtagcaaagcgtcaagctattaccaaccctaataccattgtttcaattaagcgtcacatgggtgaagctgattataaggttaaagttggtgataaggaatatacaccacaagaaatttcagcatttattttacaatatattaagaaattctcagaagattacttgggtgaagaagttaaggatgctgttattactgttcctgcttacttcaatgatgctcaacgccaagctactaaggacgctggtaagattgctggtttgaatgtgcaaagaattattaacgaaccaactgcttcagcattagccttcggtttaaataaagaccaagatgaaaaagtcttagtatacgaccttggtggtggtacttttgatgtttctgtattgcaattaggtgatggtgtcttccaagtattgtcaactaatggtgatactcatcttggtggtgatgactttgatcaccgtatcatggattggttaattaagaactttaaggatgaaaatggtgttgatttgtcgaaggacaagatggcaatgcaacgcttaaaggatgctgcagaaaaagcaaagaaggacttgtcaggtgtatcaagtactcacatctcacttccattcatttctgctagcgaagctggtccattacaccttgaagcagatttaactcgtgctaagtttgatgaattaactgctgacttggtagaaaagactaaggtaccatttgacaatgcattgaaggatgcaggtcttactgttaatgacattgacaaggttattttaaatggtggttctactcgtattccagctgttcaaaaggcagttaaggaatgggctggtaaggaacctgaccattcaattaaccctgatgaagctgtagctatgggtgcagcaattcaaggtggtgttatctcaggtgatgttaaggatattgttttacttgatgttaccccattgtcacttggtattgagaccatgggtggtgtcttcactaagttaatcgacagaaacactactattccaacttcaaagagtcaaatcttctcaactgcagcagataatcaaccagctgtagatgttcacgtattgcaaggtgaacgtccaatggctgcagacgacaagactcttggccgctttgagttaactgatattccaccagcaccacgtggtgttcctcaaattcaagttaccttcgatatcgataagaacggtattgtaaatgtatctgctaaggatatgggtactggcaaggaacaaaagattactattaagagttcatccggtttatcagatgaagaaattaaacgtatgcaaaaggatgctgaagaacacgctgatgaagataagaagcgtaaggaagaagcagaccttagaaacgaagtagatcaattaatctttactacagataagactttgaaagatactaaggataagctctctgatagcgatcgtaagccagttgaagatgctcttgaagctttgaagaaagcccaaaaggacaacaacttggatgaaatgaaagaaaagaaagatgctttatccaaggctgctcaagacttagctgttaagttgtatcaacaaaatggtggtgctgctggtcaagctggtccacaagcaggtcctcaaggcccacaaggtggtaattcaaataatggcaacaacggtaatgcccaagatggtgaattccacaaagtagatccaaataagtaatgggtttataattaaacaaaaggagaaaagaactacccattgagtagttcttttcttttgagaatacaaggagttcaaatagatggcacaagaagattactataaagtacttggcgtagatcgtgacgccagtgatcaggaaataagtagggcatatcgtaaattagccaaaaaatatcacccagatttaaaccatgaacctggagctgaagaaaagtataagcaggttaacgaagcctatgaggttttgcatgataagcaaaaacgtgcgcaatatgatcaatttggttctgctggtgtaaatggtcaaggtggctttggtggtggagctggtcaaggctttggcggtgccggatttgatacttctggctttggtgattttggcgatatctttggcgatatttttggtcaaggccgtcaacagagggttgatccaactgcaccacaacgtggccaagatttggattatcaattgacaattgattttatggatgccattaagggcaaaaagacccaggtcagctatactcgaagcgaaacttgtgaaacttgtggcggtaatggttgtgaaaaaggtacacatccaattacctgtgataaatgtcatggaactggttatatgacaattactcaacaatcaatgttgggcatgatccgtcgtcaaaccacttgtgacaaatgtcatggtcgtggtgtgattattgagtatccatgtaaaacctgtggcggtaaaggaacagttgaccgtaagaatactattgaagtggatattccagcgggaatcgacaatggtcaacaacttagatatcaaggccaaggcgaagcaggtataaatggcggaccatatggtgatttatatattaactatcgaattaaaccatctaaagattttgagcgtcgtggccagactatttatacagaagtaccaatctcatttgctcaggctactttaggagatgaaattaacgttaagactgtgcatggtgatgtaaagctaactattccagctggtacgcaacctaataagaagtttactttgcgtggacagggtgtgccatatcttcgtggtaatggcaatggtgatcaaattactacagttaatattgttattccaaagcacattaatgataagcaaaagaaagatttgaccaactttgttcatgatggtggtggcaatattacaccacaagaaaaaggattttttgaacgcttaaaagataagtttaatatgtaaatgctaaaaaggtttctgctacttgcaacagaaaccttttttaagatcaattaattttttggtgatttttagagtttttcttggaaaatattcaatgctgaattttcaattattattctaaaaactctgcattttattgaaaatttactatgctacaatttcatcatttattctagctttgctataattaatacatagtaaagggtgaacgattttatggatttaaaaaaattaaaagactatcaaaaacacattcgaaattttgctattgtggcgcatattgaccatggtaaatcgactattgctgacagaatcttagaattaactgatacagttagtcaacgtcagcttaaaaatcagatgttagatgatatgccacttgaacgtcaacgtggtattaccattaaaatgaactcagttgaagtgaaatatcatgctgaagacggtgaagactacattttccacttaatcgatacaccaggacacgttgacttttcatatgaggtatcacgttctctagctgcctgtgaaggtgctttaatggtggttgatgcttctcaaggtgtacaggctcaaactttggctaatacttatttggcaattgatgacgatttggcaatcttgccagtaattaacaagattgacttaccatctgccgatgttcctaagactaaggaagaaattgaagaaatgttaggtttggatgcttcagaagctgccgaagtttcaggtaaaaccggtcaaggtattaaggacatgctggaaaaggtagttaaagatattccagctccgtctggtgatattactgctccattaaaagcattgattttcgactctaaatatgatgattatcgcggagtggtaatgtctgtcaaaattgaagatggatctattaaaccaggcgatcgaattcaaattatgaatactggcaaggaatatgaagtcacagaggttggtgtttctagtcctcatccaattaagaaggatattttaatcgcaggggatgtaggatatattactgctaacattaagtccgttcgagaaacacgtgttggtgacacaattactcaagctgataacccaacggctgaaccacttccaggctatcgtcaaattccaccgatggtttattctgggatgtacccagttgacaaccgtgattatgaagatttgaaggaagctttacaaaaactacagctgaatgatgcagctttagaatttgagcctgaaacttcaacagctttaggctttgggtttcgttgtggcttcttaggcttacttcatatggatgttgtacaggaaagattagagcaagaatttgaccttgatctaatcatgacagcaccatctgttgattatcatgcaattatgaatgatggaacaaccaaggtgattgataatccatctgatttgccagatgctggtgaatataaggaagttcaagaaccttatgtaaaagcggaaattatggtgccaaatgattttgttggtccagtaatggagctttgtcaacgtaagcgtggtgaattcgttaccatggattacttggataagtaccgagttaatgtaatttacaacatgccattagctgaaattatttttgatttctttgatgatttgaaatcttcgactaaaggttatgcttcacttgattatgaaattacgggttatcgtgctactgatttggttaagatcgacattttgcttaacaaggagccaattgatgcattgagttttattgctcacagatcagaagctcaagatcgtgcccgtcaaatgacttcaatgctaaaaaaactaattccacggcaaaactttgaagttgatattcagggcgcaattggagctaaaattatttctcgagctacaattaagccataccgaaaagatgttacctggaaaatccatactggtgatccagatcgtcgggctaagctgcttgaaaaacagaaacgtggtaagaagcgaatgaaagcagttggtagagttgaagtacctcaagatgctttcatggcagtcttgaagatgaacgatgatgacatcaacggtaaataaaaatggctaaaaataaaaaaaatagtgtaagtacaattttacttagagttgctgctatcatattattgcttgttggtattgctttgatatttaacaaacagatcagtgatcaattaattcatcataatcaacaatctactttaagtggaataaatagaaagacaattgaagaaaacaaaaagaaaaaaggaatgtatgattttagtaaagttaagtctttaggcattgcacaagcagcaagatcacaagtgaaaaagacttctggtgcgattggtgcgttagctattcccgatgttaatatgtatttaccgattatgttggggatgagtgatgatgcaatgtcgactggtggcggcacgatgcgagccgaccaagtaatgggtaagggaaattatcctcttgcaggtcactacatgacagcaaaaggtattcttttctcaccacttgaagatgttaaaaaaggtgagttagtttatttaactaatcttaacaaagtatatgtctatcgaatttatatgaaaaagattgttgatccaactgcggtttggctagtcgataatactaagaagaatattgtaactttgattacttgtgctgatggcggtaagaatcgttgggcaattcggggtaatctgattaaaactgaaaaggctaacaacaataatcttaaggtttttaaattaaaataaaaatttacaatctttaatcagatttagatttgcgataaaattataaatagattttgtaataaagacactcaacaatgagtgccttttcgttttgatgagagaacataaggtgtttgataattaatgaaatggcaagaaagaacagctgatgaattagcaccagacttgattgagaaatatcaactaggtcccattgcagccaaactttttgcattgcggggtattaatacagacgaaaaacttgatttttggtttaatgcaacagaagaaaatctggctgatccagcgttaatgcatgacatggataaggcaattaaccgaattaatcaagcaattgatagcggcgaaaagattacaatttatggcgattatgatgctgatggaattactgcaacgactattatgactgaaaccctaagcattttgggcgctgatgttcattattttattcctaatcgcttcaatgatgggtatggtcctaatatggaccgctatcaagatattgtagctgatggaaccagattgattatcactgttgataatggtgttactggggtcgaggaagtcaaatatgctcaagaacataatgttgatgtaatcattacagatcatcatacttttcaagaaaagaaaccggcagcttatgctactgttcattgtaattatcctggccaaaaatatccttttgatgattattgtggtgccggagtagcttacacgatttgtcgtggtctaatgcaggatactatgcctgagctgctagatttggctatgatcggaactattggcgatatggttaaggtgaccggagaggggcatattatcgttaagcgtggtttagaaatgcttaatcagacagatcgtcctggcttgcgcgctctaatcaaaaatgctggtttgactttaggcagtattaatgaaactgatgtcggctttaatattgctcctcgattaaatgctgtaggtcgattagataatgccaacttggcagttgagcttttgctaagtgatgatgaccttgaggcccaaaaaattgcagataagatcgaagaattaaacaataaacggaaagaattaaccaccgaagtctatgacaaatgtatgacgttaattcataaaaatagctggcaaaaacaaaatactttggttttatatgaccctgaatttcacgaaggtgtgttaggtttagtagctaataagatcgttgaaaagacacataaacccacgattgttttgactaaaaatgatgcaggtgaggttaaaggctcaggtaggtcctttgctggtttcaacttgtttgatgctttaaatccgatcaaggatcaatatttaaccaaatttggtggccatgattttgcctgtggtttatcattagaagaaaatcagattgcgccattacgggaaaaatttgaagatgactttcatgttgaaggtggtcttgagactaaaaaatatgacatggaattgcctatgcagggcttaactccgcagacactagcacaaatcaatcaagtaggtccatttgggacaggtgacacgcagccaatctttagtatctctaatccaacaatcactcatttctttaaaatgggtaaagataagaatcatgtcaaatttacggttgctaaaaaaggcggtaacttatcagttattggatttaataaaggctttttgaataataatcttttgccgtttatttctcaaatttttgttcaattatcattaaatacttatcgaaatcaagtttctttacaaggaatcatgaccggactagcttttgcttcaccaaaattggcagtgccaacgccagttgttgacttacgccaagagaaatatgttatgggtttcgcggaccgctacctgttatttgatcaaaaaaatattccgattgttcgcaaccgactacagatcgatgaagacaagatctctttagttaaagattatgatcaaactggtgaaacagttgcattattagatgtgccacgcaatcagattgaattaaatgctgcattggagaaagattatcaacaaatctatttacgctttttgcttgatcaattgcctgttgaacaaattcccgctaaaaattattttggtgctgttttaaaatatatttatagtcaccctacgttaaagccagcagattaccgtacagttgcaccttatttgggactagattatgatagtgtgcttttcattttacgagttttctttgaattaggctttgtaaaattggatgaaggtaaattggtaggagagccttctcctaaaaaacagccgctgacagcttctaaatatttaatgggaacttcttctcagattaaatttgttaatcaactaagaactatgcctagtcaacgtttgattacatatgttaataatttgacaaataaatagataactattctgttttcagtgcttttatcgttaaaatttgttaaaatatactggtcaaaagcgtttgaacacaaacacagagcattttggaggttatgcttcttatggcagttgattttagtaaatatattgcaagtgttaaggattttcctaacaaaggcattgtttttcgcgatattacaccaattttgcaagatggtgaattgtatcgtgccgctactcatgaattagcggaatatgcaaagagtaaaaaagcagatgtaattgttgggcctgaagcacgtggttttattgtaggttgtccagtagctactgagttaggtttaggttttgtacctgcaagaaagccacataagttaccaagagaagttgaacgtgcttcctatgatttggaatatggttcaaacagtttggaaatgcacaaggatgcgattaaacctggacaaagagtggttgtctgtgatgacttgatggctaccgcaggtactttaagagcttctaaagagctaattgaaaaccttggtggtaagttagttggtgccgcattctacatcgaattgccagatttacacggtagagataaattacctgatgttgatatttattcacttgttcaatatcatggtgcttaaaatagaataaataaaaagagggaattaaatcaatttgaactgagacctaaaagttagacacttttaggtctttttctacgtaaagtcaagcataataagaagtttggcttcattttttgtttaaatttcaacttaaacatcttttagtgtcgatttatttttttagttagacacgacaaataagcccagatccatatctgatttttgggcttagcgttataatgtacttgatcaattaattacgactaaagtctttttgattatgtgtggctacgttgtaatcatatggttgatcattgataatcagggcataaatggttctgattagtttatgaattgaagcaatagctatctttttgaaccctttggtttgagaggatagctttttgctttcataataatctgctatatgacacggatttgtcttagctgcattatcaatttgtccaatagctcgataaagcaacttacgtgcgactgcattgccatgtttagtaatacttaaattagagtccatttctcctgactgatatctgcctggatcaattccgataaaagcattgattttattaggattactaaatctgcgtaaatctcctaactctgctaaaactctgacagcagtggtctgtgcaaagcctggaatgctttctaggttttctaaatcatgattaggcaaagacttcgctaacttaaccattcttgcgattaaattttctctttgatcacttaaattaagcaatctgtgtgcataatactgcacttgctcgacttctatgctagagcaagatacaactggataagcttgataagctaattcaattaatttatctgcagtccttagagcgtgtttaaaagcaatcccctttaagctcattaaccagttaataagctgttttttatcttctcttcttactaagtcacaatgaggatatcgcacaactatttgccagtaatttttacctttagcagaagaaaataaattttcaatttcaggaaaagtcgattgtagagcttggtgaagtcgatttttagctattaccaagtcacttgtcagctggtcatagaagcggctcaaagcattaagctgcttataagtttgggattcgctttgattaaccggatggcgataaagtctttgaattaaagctaaatgataagcatcagttttatcggtcttgttgtagcgtagccccatattcatctcttttttggctttaagcggattaataacaacatattcatagccgtagtcttcaagaaaagcctgcagtctgcgtgaataaacaccggtagcttcaaaaataatttgcggatgtttagaaaaagcggttaattcatgaagcaattgaataaaaccaggacgattattagtaatggttagttcatttttgctttcaccaattagttcacaaacagtagaagtagacttgcttacatcaattccaaaagtaacttgcataataaaaacctccaaaacttagtagtaaaacgtatttacttaagaaatcagatctaattttctaaactcgacatctagtgtccacattcttcgaagagactattgaaaacttaagtaaaactgccagtttattatgcgacatcaagtgtctaaagacctcagggcatatcgttttaccactactttaattctacaaaagaataaaaatagtgaatcaattatcccgtcggataactaattcactatttagcttagaatgtttattatttgttaccgattaatttaaattttgaccatggtttaataaagtcgagcaggaataattcgtctgatctaatagaaccgactttgttcatccttgactccttatgaggttcaaggacaatttgtagttcatttttgtaatgaccaaagttgtcgttaccaatgataatatctccgcgttggaattctacattgttgtcgtgtactggattaggaatatctgcataagttacacggggcatggttgaacgaattacatccttagtgatatcaccacgacggaaatgttgaggcgcttctacgatagttttctcaatcttattaacatcagtaacgtagtttacgtgcaacatcaattgatagcgattaactttagataaggcttttaactcggcttcactggcataagcattaccgatgattacatcatcaatcaacccagaagcccagagatgcattgcttgcacatcaattggtaaattacggtcttgctcaagcgttggtaaaccatcttccacgttccaaggtcccatttgacctacttgacttgagacaaaagcggctgaatgaatgccaaactttttgaagcgttcagaacaagcgataaagaagtcgtaaggtaagccagtaccgcgttgaggataaaaattgtgacagccataaataaacggtgtattagcttggtaagaaataatattgttaagatagtcaacattattactcatgttgagttcaatgattagaccatatgggttgtaagaaagcattgcttcaattgcaccatcaaatgttgtgtcaagacggatgcctgctgcaccaatatcagcaaaaaatttcaggtcatcatagctgacacctagttgtttgaagattgcaggattaacatctaaaaaagtttgaaatcccaatttattgccatattcaatgatttttttatacttagctttggtttcttcagggctgccttgtacttcaagcatactcatgaagatacgagaaaagccatatttgtgagctaagtccagatagtgagcgttgccttcaaatttgctgtggcctggataaattgacagacctaaagatctcattgtcataatagtacctcatttttgataattgtctataccaattatatgatattttttattgtaggtctagtccaaagtgaccgagatagtttatattttggtagggtgtctcgctacgtttttaattaaacaggtgttatatttaaagtacagggtatgtgttaagaaggagaaattaagatggataattttgatcaagaatctggtcaacagcaatatgctaatgattcaggattaaatgttttttagcaaaatatatggttatatggccttagcggttttcgtttcagcaattagtgcttatttgacaatgacggtttttgcgggacctatctctgcctttattgcacaacaccaattgtttacggcgttacctttgcttttattgcaggtgcatatagtggacaaaatattgcttcagcatttgtagcttcggcaaccgtctttgtaacaatggcgattttaggaacaattaccaaaaaagatttgagtcgaatagggtcttatgcttctgctgcgttaattgggttgattgtagccatgttagctaatttgtttttacataatccaatcattgactacgttttttcgattattgctgtgattatatttactattttaactgcgtgggatgcacaaagaatgaaagatatttatttacaatatggtgatgatctttcaactaatgggcttgcagttttaggtgctttgcaattatatcttgattttgttaacttgtttttacaatttttggatatttttggtgcaaatgaagataagtaattaaactagtgagactgtaaaatagtttgtgtaaggatgaatgattccttaaatttatttctttaaacattagaaaaaggagttcctttctcgtatgattggtttgaacaaaaaaacacatacagaaagaagaactccttcatgaatgattttaccaaaaatatagcacaagctctattcaatcaagacaaaataaatgatttattgcgcaaagagctacaacaggctgttaataacttgttagaagctgaattgactgcctttctgggctatgatccctatgccagaaatggctggaatactggcaactctagaaatggtgcttatttccgcaaagttgatacgcaatttggcccaattgaagtgcaagtgccccgggatcgcaacggtcaatttcatcagcacacgctgcctggctacaagcagcactcggatatcttggaaagcatgattatcaagctttactccaagggcgtgaccaccagggaaatagccgatctaattgaaaagatgtatggcagccattacagtccagctcaggtatcaaatatttccaagcagatgattccaaaggttgaggcttaccacaaacgcaagctaagcgacaagtttttctgcgtctatttggatgcgacataccttcctttgcgccgagaaacatttgagcgtgaagcagtctatattgccattggcatcaagcctaatgggcacaaggaggtcattgactactgcattgcgcctagcgagaacattgaagtctggacagatatgcttcaaaacatgaaatcccgaggcttaaagcaagttgagctttttctttctgatggtgttgttggcatgaaaacagccttggccaggacttatcctaaagctcattttcaacgctgtttggttcatgtcatgcgcaatatctgcgctaaagtacgcgtcgacgatcgtgaaaagatcatgaacgaattcaaacaggtgcatcaacagacaaacaaagaagaagccacagctgtcctgcatgacttctataccaaatggggcaaggtttacagccatgttatcagaagcttgaaagacatagaaccagatctgctggtcttttataactatcccaagcagatcagagcttcaatttattcgactaacatgattgaatcatttaacaatgtgatcaagcgcaaagctaagcctaaggcagagtttccaactgaacagtcgcttgatgcttttattggcattcaggcaatgagctacaatgaccgttatttcaatcgaattcataaaggctttggtcaggttcaggacaccttagaatcctactttgattaaataaataattaaaaaatcaatttacgagaaagaactatttacacaaaagatttgacagtttcaaactagtttctaataaacgtaggaacacttcatatataaacgtatactatataaatatagtgacatattaagggagtgtttttatgaaaagatgcaagaattgggttgtgactattgttgcatttctgatgttagtgggagaaatcagtgttctgcctgcaaatttgcaggggtcgacatcagttgttaatgcagctattcatcacagaaggagaaagcatcaatatcgtgataaaactaagatttataccagtaattacagaattgttgataataaacgatcaaaaatctttcacgtaatgcgcggtcataattatcgaatgaatcgtgaaaatgcagttttcttcaagagtaaagcagcagcacgtgcagcaggatatcgtgaatcaaaaagataaattaaaagacttctaagagttcaaagttcctagaagtcttttaatttataaaatttatggtaataatctacctgtttttcatcacaggttggtaaattaagtcgattattatggcagcaataatcgctacaattacagtaattgctaagttttgaatggaaatctggaccattgcccaaccacaaagagctaagataaaggtcaatagaacatctgcaatttgaacactaccaaccaacttggatgggtaatcttgccaaaagtacttacgagttctagtaatcaaaacaatcaacattgcgctaagaactaggtatacgtaaaccatagtagaaacagcaccgtgactccaaccgtgtgtgtttaagaaccaaacaaacccaataccaattaaagtccaaccagcagctagtgaaaaggcgatcttagcaagcttagccatattccagttttctggcttataagtaatgtgagtcctgtcagttccaatcatcatcgtaaccatattgttcataatggtatagataaccattgcattcaaggccattgggatgtagtcaaagaaaagatagccaaaagttaacagcatcgttaattcagcagttctagcaagcttggttagtgaccaagtagtcattctttggtatacgcgatgtccagcgtctaaaattttaacaattgagcctagaccatcgtctagtaataccattttacccgaacgcttagctacgtcagcagcatttgaaactgcgattcctacttcagcttgttttaatgcaggcgcgtcgttaactccgtcacctgtcatccctacgatatagcctttttcttggaaaagctttaccatcttgagtttatcttctggtaaaacatcagcaataccggccaaatcattaatatcagtattttcattgaaatcgtgaatcgaaattactttaccagttaaatcaacttgttctgccactgcagcagcggtcttttgattgtcaccagttaacataattgggcgaacgccacgtttcttgagttcagccaaagctgctttagagtctgttctaactttatcttgtaagatgaagacaccagctaacttatcgtcaatcaagactgccactgagcgtcctgccttgaaattaattccagaaatttcttcatcggcatgtttatcgatcaaagataattgcttaaatgaaccaagctttacattatgtccagcaacatcagccatagaataaccagtgtcagaagtaaatggagtaaagttttcagcattcatgactggaatgttattttctactaagtattcatcgattgctgtatcgataataccagcattacgtttatcagttgcggctccagctaaagcaagcacgtctttgtcaggcaagtcacttagatcagtccaagcggctacggcagttttgttttccgtaattgttccagtcttatcaagtaaaagcaagttcaagttagctgcgtcctgaattccagttaggtcagaagtcaggactccttctttacttaagcgggttgcttcaaatgagttggataaagcaaaagttgatggcattgctacaggaattgaagcaataaacatcattgccaggaatggcaacatattaataaaggtattgaaattaccgcctttgaagaaggaggcgataataataactaaggttaaaacaccatctagtaagcaaaggtagtagataatcttagtcaaaagttgttgtaagtgaccaggagcagcggaattgttgatcaaattaatcgtcttaccgcttctagaatctttacctgtagcagtaacaacagctaggccatcaccttcaacaactgtagtaccggcaaaggcggtgtcatcaattgctttcttaactggtttagattcacctgtaattgagctttcatcacaagctaagttaccgtcaacaattttaacatctgctgcgagtacgtccccgcgtttaagtgagattaaatcgcctttaactagttgtttagaatcaagtttgatccacttgccatcgcgttcaactgatacagtaggagtcaacttgtgtgaaatattatttaaaactcgtcttgattgctttttcttagatgcaccgttaaatgcagcaaataaaagcatcaacaacacgaataatgattggacccatttgcccaagatacattctagaattaaagcagcttctagaatccaagcggataggttccataacttagacaagaactctttaaagaaattgtattcaggctctggtacttcatttaagctatcttcttttaagcgcttgtctgcttcggcttgagttaagccgtgaaatttatcagacattattttccctccaaatctaccttaataaggtagcacagatattgctatgaataaaatactaaaatacaatataagatattaaatattttaatatcactatcaattgaaataaaaaaaggataaataatatgaatctaaaacagttacgttattttctagttgtagcagaagaaaagcagattacagcagctgctaagcgcttgtatattgcacagccaccattaagctatcaattaaaacaattagagaaagagttgggcgcgcaattatttaaaagaacggcacatggtattgagctaactgatgtgggacaaatttttcaaagctatgccaatgaaattatttctctagctcaaaatgctgaaaaccaagtacataagactatttccggtgaattgggaacgattgcaattggaatggcatcttcctcaacgggcttgataccaatgaattcttttaatgaattacgaaaatattatccggaaatttcttttgatatttatgaagataatacttatggcatcctggataaattagaaaaaaagacaatcgatctaggcattgtacgaacgccttacaaccagacaggtttaaatactaagactttaacaactgaaaaaatgatggctattagtgtagacccagattttcagcaaaaaaaagaattacgcattaaagatctagcagatcagccattgattatttatcgtcgctttgaggatatttttaatcaaacttttgcacatcatgggcttaaaccattttatgcggttaagtgtgatgattcacggacagcaattacttgggccaagagaaaaatgggagtagcgctagtaccagaatcaattgcgacaacttatgcccaagaaaatatgatcgcaattaaacatgctaattggataacacatttgcagctggtttggcgtaaagatcatcaagttacacctttaatgaaaaaaatcattgctgcaatatgataatactgtaacttttacctaattgatccataataaatgtaaacgggtacaataattaatagaaggtggttgaatgtcgagtccgattcatgtttattcagaaattggtaagttaaaaacggtgatgttacatcgaccgggaaaagaactagaaaatctagccccagatattttgcatcgaatgttgattgacgatattccttatctgaagattgcccaagaagaacatgatgcttttgcgcatgtattgaggcagcaggggatcaaagtattatatcttgaggatttattagcagaatctttaacagatgagaaagttcgtcgggcattcttagatcagttactggatgaatcaagtattaaaaaacaggatcctttgcatcaattattgctgaactatctccaagaattgctaactaaggaaatggtaaaaacggtgattgctggaattagaaaaagtgcgattcataattctaccccatctttagcagatttggctgaggacccagattaccctttttatcttgatccaatgccaaatgtatattttactcgagatcaacaggctgcaattggttcagggatgaccattaaccggatgactttcagagctagacgacgtgaatcattatttatggaaacaattttgaaaaatcatcctgatttcaagaacgcaactattccagtttggcgtgaccgttatcatcatggtcgccttgagggcggggatgaactagttctaaataaccatgtgttagctgtaggtatttcacaacgcacttctgcaactgcaattactgacttagctcataatttatttgatcattcaagttatgatacgattttagcgattaagattccgcacaatcatgctatgatgcaccttgatatagtttttacaatgattaattataatcaatttacggttcatccctttattttagataaagccggcaaaattgatatttatgttctacagcccgatgatcacaacggtgtaaaaatcacagaaaagaatgatttggtgcaggttttgaaagaaaacttacatttaagcgaattggatttaattccaactggtggtggtgatccaattgccgcaccacgtgaacaatggaatgacggctcaaataccttggcaattgcaccaggtgaagtcgttacttatgatcgtaattatgtatccaatgatttgctaagaaaacatggcatcatcgttcatgagattcggtctagtgaactctcacgtggtcgtggcggtcctagatgtatgtcgtgtccgttgattcgtgaagatttataagaggcaaaaaatgaaatatttacaaaatgtttttcaaggtagaagttttctcgattgtaaagactatactccagctgaaatttcatatttaattgattttgcattacatttaaaagaacttaaaaaagagcatatcccacatgaatatctgaaaggtaaaaatattgcactactttttgaaaaagcctcaactaggacgcgatctgcttttgtagtagcttgtaatgatttaggtgctcatccagaatatctaggcgcaagcgagatccacttaggtaaaaaagaaagcgtcaaggatacggctaaagtcctaggctcaatgtatgatggaattgaatatcgcggttttgctcaagaagatgtagaagagctggctaaatattctggcgttcctgtttggaagtgggtgatggccgcgataatgttgccgacagtcttttagtttgtggctcaatgttaggtgttaatgtacatattgttacacccaagcctttgtttacacatcctgatgtacaaaaaattgctcaaaattttgcccaagattcaggttcaaaaaatttgatcacagatgatattgctcaaggcgttaaaggagccaatgttgtttataccgatgttggggtttcgatgggtgaaaatgattggtctgaacgaattaaattattaaagccatatacggtcacaatgaaaatgatgcaaatgactggtacaccagatgaccaattgatctttatgcattgtttgacagcttttcatgatcgaacaactcaggtgggagaagaaatctatgaaaaatatggcttaaatgagatggaagtaactgatgaggtctttaattcaaagtatgcttggcaatttacagaagctgaaaatcgattgcattcaattaaagcagtgatggcggctactttaggaaatttatttattccgattgcctgtggcggtggtggcatccttgttattgtgaaagatgggcatctcagaggtgttgccggcgtaattcataaagatttttccgctgctaaaatggcagaagatatcaacgctgatgaattagtaattctaacaacggtggatcatgcatttttgaattatggcaaagaaaatcaacaagcaattggtaaaataaaagttgaacagctcaaacaatatctagcagcaggttatttcgcagctgggagtatgaagcctaagatagaagctgcaattgaatttgtagaaaaaacaggtaatttagcaattatcacctctttgagcaatgccaacaaactagcagacggagtcggcacaatcatttataattaactgggtgataaaaatgaatatttttaatgaaggaaaaaagcaggatattgcccaagttttagcagctaaagataggcgagtagctgtacaacataagatttttaataagtatcctaatcaaactctagtcgacattaatatgaatatcccaggaccaatcaagaataatcgctatttaactaaaatgtttatgttgggtatcaatgagctggaaaatgcttggactaacctaggttatcattttaaattggtgacacagcttaatgatgatagtggctgtgaaaacttttatgtattatctttgtcaattgaaaaagtaaagcgctcaacaattgattttgagaatcagatatcattgggacgtctctttgatgcagacgtgttggtaaaaaataaacaagctgcaatttcacgcagagatttgggcaggcagccacgtaagtgctttttatgtgatcgccctgctaaagaatgtgctcgtagccggagacattcagtggaacagatgcaggcatttatctctcagctttatcaagaatacgttgcgtaaaataaaccgggattttatgattccggtttatttttatgaaaaatctagttaaaaatttaaaaaatgaactaaaatagtaatgaataaatttatagatgtacgtataggaataagcatggaattaaagaaaaataagaataatttaaagcaaattacggcattaattcaatatgcatttttgaaaaataatgatttgactaaagacgaaaattttatgagtcgttatgatcatagtacaggttatggctattttgataaggaaaaattagctagctatattatggttaatcgatttaaaagtgatgtttttgggcatcatttaccgatggctggaataggttatgtagcttcatatcctgagtatcgtggccaaggtcatatttcccaattaatgaaagaaattttgcatgacttacataggcaagatattccgtttgctaacctggcaccattttcggagagcttttatcgccagtacgggtttagcaatagtatttatcaaaaagaatatcgctttgatggaagcgcattgcgtagttttaaattaccacgttctggtcatatagtgcgtggcaagtgggacaatttagctgttcaaaatggtgtgattcaactttatgaacgtcaactgcatactgatgatgaacgtaacacggttgtacgtgaggcatggtggtggaatagacttgattcttattatcatcaccgcaatgtagccgtttattttgacgcggatgagcggccaattagttacttgatttatcgcattagagacaatacttttttagctgatgaaatgtacgcaattacgccgcagggattactgagtatgtttggttttatgggttcgcacgcgggcagtgttaagcaatttaaaatgagcgtaccagagaaatcgttacgagctgaactttttcctgaacaaaacgaactccaagttgatttgcgtccttatatgatgagtcgaattattgattttgaaaaagttttggcttgtatgcggccaatgcaagaaggtgattttaatctggaagtcaatagcgatgaacagtgtccttggaatattggagtttggcaattaagtaatcatggacgtaaggtagcggtagaacgtaaggaagatgcattggttgatttttcgggatcaattaccgcgtggacccaggtgctattaggtagactaaccatgaatgctgctgttaaactaggattaattacagattaccgcatcaaaaaattagatttcgttaaaggcgatgtatcattttatgattatttttagttgtgaggttaaaaaatgagtaaagaaaagaaactcaatttaataaaattatttggcattgtagttagtggtttgaatttgatcttttttgccttgatggcacttaataagcatgaagatactaaggataaaagaagagtagcagaagaaggacacgcaccgctggatgaaaaataaaatgacggaattaaagattgcatattttgaccaattaggtcgtaaggaattagatcaggcagtgcagcattttgtgttaaaacatcctaatgtagatgtaaaactacttgcgactagtcatgatggtgcttttgcaaaactgaatgaagatgaagcagacatagcaatcaatgatttgcgtgacgagaatcttaactttgatgaaacagaattgactcaagctggtgtaatggcaattttgcccaagggaatgtatcctaatggcattcaaatgattgaaaaagacgagctcaatgatatgacttgttttattgtggctaaacctgaagaagaggttagtgagctacatttatttaaagatttgtatcaaattggcagtcaattcatcgcttctaactcggtcgaagaagcagcactgttggtcgcctctaggtctggctattttattttaaatgagaatacggctaggttaattaatactacagatttgcagccacttttcttgcttgatcatggtcagttaataaagcaaaagataatggctttttataagtcaaattcagcgttaagtagtgagtttataaagctattgcagcaagaatattaatctgtaaagttaaaaatatcttgtctaagtactataagatactgtaaaatatattatgaaagcggactcatatattttacattctggagatgatttttatgctaaaaagaactttgttacctttaacatcaatggtacttgttttaggattaactggtttggctagtcaagttgagactgttgatgcttcaacttatggtaatggtgtacaggttactattccaaaaaagatgcagggtacttggtactcttatgatcgtaatgcacataatggcacaaagatcacctttactgaacatactgttaatggcaaaccaatatttacccaggaggcttcgacaattagtgattacttcaatggtagaattgctaaccagaagaactttgataaggtaacgcaaaactggatgtctggtaaaactaccaaaatgaagaatgatacattctatgagattgatccgtggattacttttgaaaattggagtctttatcgagtggtaccacaaaccattaatggtaaaaagcataacgtgctggtttattctagtagatatgatggtggtaactacttcagaagcaagaaattagctaaaaaaatgaaggactacaagtttaagaaagttaattacacgttatagttttgtgacatcccttaactaagggatgttttttactaatagacgcgataaaatttagtataataatgacaaaattaattcttggaggagaagttatgaaattaaaacaaacaccaattttgcgtttatataaactagaaactaataaagaggatcatgcaaagttcgttaaggcagggcaacataatatgcttacttctcaagaaaacgaaccaggcacattgtttatgcagacaagtcatgacgaagaaactactaattttgtagtagaatgctatcaagacgaagcaagttatgatactcatgctaattcaaagcaatttaaggattttactgacgttgctaaagatattttaactagtcgagtaaaggtagaattgtttccggaatttatttctacaaaggcagaaaaactagcagttaccggatcaaatgattatgttatttatctgactgaaattggtgtttctttaggtaagggcgatgagtttgctcatgctgtaatgaaagaaatgaaaacggcagtcgaagaagaaaaagatattttggcaatgattgcaggaactgttgccgatcaaccaaatgaatggttagctattgaagtttatcgtaataatgaagcttacaagcagcacttggaaactaagaacttcaaagagtatttgaataatacaaaatattgtgttgaaagtaagagtttacgtaagttgcaaccagatgtaattgttgaccaaggtgcaattttctaccaaccataaagaataagacgaaaagaagaccaggctatgtggagtacataacctggtctttctagttagaggggaaaagatttattaacatatattattctggtttttagtggcgatgttttacctttgctactgctggtttattaattaatactgagctgatggccattaaaccaagcgttaaaaatgatccaccaattaagagtagtttaatcaaggttctcattcctttcatcttaattgatcttataatagcgaaataatattaagaatttatatgtaaaacctaatggattagttaagaaaataaaactagaaaaaaggctgaaactgtcaaatcttttgtgtaaatagttctttctcgtaaattgattttttaattatttatttaatcaaagtaggattctaaggtgtcctgaacctgaccaaagcctttatgaattcgattgaaataacggtcattgtagctcattgcctgaatgccaataaaagcatcaagcgactgttcagttggaaactctgccttaggcttagctttgcgcttgatcacattgttaaatgattcaatcatgttagtcgaataaattgaagctctgatctgcttgggatagttataaaagaccagcagatctggttctatgtctttcaagcttctgataacatggctgtaaaccttgccccatttggtatagaagtcatgcaggacagctgtggcttcttctttgtttgtctgttgatgcacctgtttgaattcgttcatgatcttttcacgatcgtcgacgcgtactttagcgcagatattgcgcatgacatgaaccaaacagcgttgaaaatgagctttaggataagtcctggccaaggctgttttcatgccaacaacaccatcagaaagaaaaagctcaacttgctttaagcctcgggatttcatgttttgaagcatatctgtccagacttcaatgttctcgctaggtgcaatgcagtagtcaatgacctccttgtgcccattaggcttgatgccaatggcaatatagactgcttcacgctcaaatgtttctcggcgcaaaggaaggtatgtcgcatccaaatagacgcagaaaaacttgtcgcttagcttgcgtttgtggtaagcctcaacctttggaatcatctgcttggaaatatttgatacctgagctggactgtaatggctgccatacatcttttcaattagatcggctatttccctggtggtcacgcccttggagtaaagcttgataatcatgctttccaagatatccgagtgctgcttgtagtcaggcagcgtgtgctgatgaaattgaccgttgcgatcccgaggcacttgcacttcaattgggccaaattgcgtatcaactttgcggaaataagcaccatttctagagttgccagtattccagccatttctggcatagggatcatagcccagaaaggcagtcaattcagcttctaacaagttattaacagcctgttgtagctctttgcacaataaatcatttattttgtctggattgaatagagcttgagcaaaatctttggtaaaatcattcatgaaggagttcttctttctgtatgtgtttttttgttcaaaccaatcatacgagaaaggaactcctttttctaatgtttaaagaaataaatttaaggaatcattcatccttacacaaactattttacagtctcaaaaggctggttagcacgtaaaatagaaatagagtcaaagtctagtgcaactgcgcataaaataaagcagtatcgatgggatgctgcttgttttggttaaaaaatagagaatatgcttgtagcccttttcgtaaatagcgttaatgttgtaaaatggaaagtgcattaagtttattaatgagaaaattgatgtattattgcaaaataggccgtaatggccctttttgttgtgaaaaaattaaaagaatataggattggaaatgccaggaatagtagagcaaacattattagaacaacaaaatattgatttaaatgaaatggtaacaatgaatcaaatgattgatcaattgttgcctaatgcaagtaaagaattacaacaaaaactaaagattaaaatttataactttgtgcgtacacgtaaacaaccaagtattactgtgcgaagaagaaaatattttaagccggctgttgctaaattaattattggtaatgtacaagattacgcagatgcaattgaacgtcgtgctaaggaagccccagctaaagaggatgctactgataagaggccagcttctaaatctaagcgggttaagacaattactaagcgtaagattttagctaaagttataaagaatgataagattgataaatctattcaaaagaaattagaggataagattgcttcaattgtgaagaccaactttattaagccagttaacaagcggggaagtttttcggttgaagatggtgaaaaagttatagctgaacttagtcctttttatcaaaatatcaagattgatcaaaagtatcgcaagaatgctgaaaaagcggctgaaaataaggaaacagaaactaaagaaaagcctgagcaacattctaaggatcagaatgaaagtcgtgaaggtcaatctaaggactttgagcgtaagaataatcagaagaatagcaataatcgaaataataataatcaaacgcaaaatcaacgtaagcgacaaaataagcatccttttgagatcagaagagaaaataataaccgctcacgtaataatcagtctaaccgccgctataataatcgaaataattatgataatcggaataattatgaatttgatgaagctagcggtttgcgtgaacgctacaatacagtaatcagaaattacaatcaactggagcaaagatataatgctttgcaagataaatataatcaggctttagatgataaagctagattgatcgaagaaatgggtaagaagaacgaagacttacgtcgtgtattgatcgacgttttgcgaaaaatgtagtttttggtaaacaaagagactagtagtcaatttgaattgattactagtcttattttatgtttatgaaatatgatttagcttaaaaattaaaaaaatatgtgtaaaaaattatttttgcgtagtaagattaaaggatgataaatatttttattaatgattaatggaggagaagtatgagtttaaaagagctatttaaaagcaatgtgtttcgaggaaactgtcaaatcttttgtgtaaatagatttttctcgtagattgattttttaatcttttatttaatcaaagtaggattctaaggtatcctgaacctgaccgaagcctttgtggattcgattgaaatagcgttcgttgtagctcattgcttgaatgccaataaaagtatcaagcgactgttcatttggaaactctgctttaggtttagctttacgcttgataacgttgttaaaggattcgatcatattggtggagtaaattgaagccctgatctgcttaggatagctgtaaaagaccagcagatcaggctcaatctctttgagatctctgatgacatggttgtacgctctgttccacttgtcatagaaggcgtgcaagactttgatcgcagcttctttatttggctgttgatggatttgcttgaattcattcatgatcttttcacgatcgtcgacgcgtactttagcgcagatattgcgcatgacatgaaccaaacagcgttgaaaatgagctttaggataagtcctggccaaggctgttttcatgccaacaacaccatcagaaagaaaaagctcaacttgctttaagcctcgggatttcatgttttgaagcatatctgtccagacttcaatgttctcgctaggtgcaatgcagtagtcaatgacctccttgtgcccattaggcttgatgccaatggcaatatagactgcttcacgctcaaatgtttctcggcgcaaaggaaggtatgtcgcatccaaatagacgcagaaaaacttgtcgcttagcttgcgtttgtggtaagcctcaacctttggaatcatctgcttggaaatatttgatacctgagctggactgtaatggctgccatacatcttttcaattagatcggctatttccctggtggtcacgcccttggagtaaagcttgataatcatgctttccaagatatccgagtgctgcttgtagccaggcagcgtgtgctgatgaaattgaccgttgcgatcccgaggcacttgcacttcaattgggccaaattgcgtatcaactttgcggaaataagcaccatttctagagttgccagtattccagccatttctggcatagggatcatagcccagaaaggcagtcaattcagcttctaacaagttattaacagcctgttgtagctctttgcgcaataaatcatttattttgtctggattgaatagagcttgagcaaaatctttggtaaaatcattcatgaaggagttcttctttctgtatgtgtttttttgttcaaaccaatcatacgagaaaggaactcctttttctaatgtttaaagaaataaatttaaggaatcattcatccttacacaaactattttacagtctcgtttcgagcctgcattattatcttattgtatgttttatacgcattatttgggagttttagtgaatatttatttaaatatgctctgaattcaattactgctggtaattttaatacatatgtttattggcaaataatgcagtttgttttagcattattcacttcgttgcttttaccaattactaccgttgttttcactaggcagacgcaaaactatctgcataaaattcggcaagaaatcatgcatcattactattatgaaaaaagtgatgaaaaagtctctagtatgcagaaccgattaacagccaatttaaaaatcttatcagatgattatgctacaccttggattactatcttaagtggggttttagagattgtgattgctattgttttactagcaagcatgaactggattctaattttggttactgccattttagctgtgattacactttttgctcctaaaattatggagaagaaaacatcagctgccacagataaagtaaataaaaagaatgaaaagctgttaaatacaattgctcattggcttggtggattgcaggaactacgtcgttatagtgcatacagtcgtttggttaagcaaattcatcgatcaagtagtgattatgtggacgcaagtaagggtagtgcaaaattaagaagtgtaagttatttgattaatgcttttagcaattcaattgcacaaattggtatgagctttattgctggaatcatatttttgcttaatatgatttcattcggtgattttgcagttgctagtggttttgcatttacgattttttcagcaatttggaatattactcagtcgttaacgcaagttaagtcaactaaggctttacgcgaacagattaccgatttaagaaagcaagttcctgatgaaaataaagataaagtatcagcctacggtcttaaagtttcaggcttgtctgtaaaatacgatcagggggaaacaattttttatcctgattttacaataaaaaaagggcagaaagttttgcttactggcgattcaggaacaggaaaatcaaccttgtttaatgttttgttaggtaagctaaaacctgaatctggtacggtgacctatctagatgaaaatgaaactatcattcctgaaggaaaagctagaattggcaatatgccgcaaaatccagtagtttttcccgcaacgatcaaagagaacattacaatgtttaacgaaaatttgcaggataagcttcaagatgttgttcaagcagttcaactccaatccgacttagccaaaatgccagatggtgttaatacaacaattgatctaaaaagtgaaaatttgtctggtggacaacggcaaaaagttgttttagcgcgaacggaaatacacgagcaatcgtttgttttaatggatgaagtaactagtgcgatcgatcaaaaagctaccgaaaaaatcattgatgaattgctcaaaacagatcaaactattttgatgattgctcacaactttacgccagaattaaaagcaaaatttgatcaagaaattaaattaaaaagtaagaaaggggataaagtaagatgaatttgaaagcttttattaaaaccaatccagttcgtttctggttaactgcaattggttggattattattcctgctttatcaattaccaatacttacgttgtacaagaagagacgaatatccttttaagtcgtaattggactaagtttattttaatcaatgttcttgcttttctgattatgttagttgactatggtgtgagtgctttagttgattatcagcagcaggctcaggtacaagacttaaatgatcaagttagagataaaattgttaagcgatattattatgacgggaaaaagcatactgttgcacagatgcatagactgtaaaatagtttgtgtaaggatgaatgattccttaaatttatttctttaaacattagaaaaaggagttcctttctcgtatgattggtttgaacaaaaaaacacatacagaaagaagaactccttcatgaatgattttaccaaagattttgctcaagctctattcaatccagacaaaataaatgatttattgcgcaaagagctacaacaggctgttaataacttgttagaagctgaattgactgcctttctgggctatgatccctatgccagaaatggctggaatactggcaactctagaaatggtgcttatttccgcaaagttgatacgcaatttggcccaattgaagtgcaagtgcctcgggatcgcaacggtcaatttcatcagcacacgctgcctggctacaagcagcactcggatatcttggaaagcatgattatcaagctttactccaagggcgtgaccaccagggaaatagccgatctaattgaaaagatgtatggcagccattacagtccagctcaggtatcaaatatttccaagcagatgattccaaaggttgaggcttaccacaaacgcaagctaagcgacaagtttttctgcgtctatttggatgcgacataccttcctttgcgccgagaaacatttgagcgtgaagcagtctatattgccattggcatcaagcctaatgggcacaaggaggtcattgactactgcattgcgcctagcgagaacattgaagtctggacagatatgcttcaaaacatgaaatcccgaggcttaaagcaagttgagctttttctttctgatggtgttgttggcatgaaaacagccttggccaggacttatcctaaagctcattttcaacgctgtttggttcatgtcatgcgcaatatctgcgctaaagtacgcgtcgacgatcgtgaaaagatcatgaacgaattcaaacaggtgcatcaacagacaaacaaagaagaagccacagctgtcctgcatgacttctataccaaatggggcaaggtttacagccatgttatcagaagcttgaaagacatagaaccagatctgctggtcttttataactatcccaagcagatcagagcttcaatttattcgactaacatgattgaatcatttaacaatgtgatcaagcgcaaagctaagcctaaggcagagtttccaactgaacagtcgcttgatgcttttattggcattcaggcaatgagctacaatgaccgttatttcaatcgaattcataaaggctttggtcaggttcaggacaccttagaatcctactttgattaaataaataattaaaaaatcaatttacgagaaagatctatttacacaaaagatttgacagtttcgtaatcgggactttctgtattgaaaaaatgaagagataatttgttattgatctcaatttttaaatcttttttgttaacggtaagcgtataacagtgtcgtttgcagataaaaccatttcttaataaaaaatctacgattggattttcatttgaatcaatcatgacttgcaatgcttggtgctctgcttgaactatttttgaaaatggaatatttacagagtaatcacttagattgaattttagataaatatatttgttatgaaaaagattgtgataagtagaaatagtgcctagatgcttatcgttatcagttactttgtagattttaggagatattttttcaatttttgtagtcattttttatccttttgataattgaaattaatttttgatcggttccgtttttaattatgaagttataaatcggttcataattgagcacagggaaaataagatcaggatcaattttaggtataatgtcaatcattgatttcttactaattacgttgagatttttaacttcttgagcatttcttatctttctttttgcttgtgaaggaggataaccttgtccccaaggctgttcaaaaagattttttatagtctgctcaaaattgatttcaccactccaaccccaattaagtcctagtggaaaggagacaacattgccgttattgatatgaccaaaaagaaaagcatcttgtggagtggggatataaccacattgaatattaggaaaagtatttcatgcaagcatcattccttgtccagaagtacatcctgtcacaatgaagtcagtcgccttgctattaattaataatgcgacagctagggaaacttgcacgtaagatagactagccgaactatcttgataaataccaaaattgaatacttgatcattggatcctacagattctttgatatacttctctaatatgaaatttttacttttttgcgatgtagcttgaataatacctattttcatatttttaacctctatagtttattttttgaaagcgctttataatattatataggaagtaaagtaagaaggtgaacgtgatgaaaaaaattattgttggaactcctgttaaattgagccatgttttaatcggtatgattgtggtagttttactttcactatttttgacaggatttggttatcaagcttggtggctattccttattgtactaattttaggtgtatttgtaactttacctacttgttttaatccgtattggcagattagtagcgaaaatattacaattataaattatgatattaacgatgtgataaaattgatgcaactgctagggttacataaaaagagtaagcaagttattaatttatctgatgtaaagaaagctgccgttgtctatcgtaaaaatgtacgtcttagtcctattgactttaatcctgattatttaaatttgattttggatttaggtaagggaacaaatatgactttgacacttggaaatgtcgactatcagcaactaaattcgattatgggtttgttacaagataagaatattgtagtagatgataaacaaaatattttgcaacttttaagagaaaataaaaacttgtttaaccattttcacaagaaaggctggacatcgctataaatggataaagagcaaataattagaaattattttcgagcatggctaagtcctaatcttgaagtagtccaaaatacatttgacgaaaatgctatttatagtgaatgctatggtccagtttacagaaataaaaaggagataatatcttggtttgaaaattggaataaacaaggaaaagtaattgcttggccaatagaaagactcataattaatggtgatacgagcattgccgaatggcattttaaatgtaattatcaaggaaaaattagtgaattcgatggtgtatcaattatagaatttaatgatcaaaataagataatttctgtaaaagaatatcaatcaaagtccaaacattattatccctatagtaaataagacttttaactgttaagaggttaaaagtcttattttgaatatgaaatcttttataaactaatttctgtggaaaaaattaccaagccagcttcgtttctttttagcctcttcttttcgtcgctgttcacgatcttctaacattgccttagctagcatatcaactgtttgagtcaattgtgcttggttatctctttgttgcttatctctaaatgaactactgttttgatacttattcattaacgtatcatcatcaagccatttatcaaagttttcaacatcaataataaaaccggtgctagtttgttgcgatgcaatgtgatattttctaggcaaatatttaaagtagcgatcaagcatagtagaaccgctgtttttcgccgtttgatcggagattttattgaaaagttctttattgatttgggcttttagccggtcatcttgtttaataaataagatatcgcttccgatttttgcttgattgattaacattccccaatcatttcgaccaacaaatagggagtaatcgtaattttcttcaaaatatttgctgacttggttatacatatcaaatttatcaagtgcagtttttaaaacatgcttgattggatataagaagtctctttcaatcttctgcgcatcttcaacactaacgttagtaaagaattttgctaattcaacttgacaatatttaaaaagatcatcatttgcacgactaaataagctagttaatgcagcattacgttgatcactttcacctgaaaaagtagattcaaagcttaaataccataaacgacgcataatttcaggctttagagaaaattgtgatttaatagagctttcttgtctattcatcgtgaaaatgaatgctggtgagggatgagttaaattacgattgttagtaacttccttgatgaatctttcaaagtaagtacgggttgtaagctcgggactgacatcatcaatcattaatggacttacaggaccatttgtatatacatagtcacttagcgtgttggtaattgtcatattgatattactcttgccaagggcataattctttggatccatcattccactatctaagaaattatgagcaccaattaatttagcggctagtcttttccctagggtggacttaccagttcgaccttgtccgattagtgctgtagcaataggcacgtcttctctagatacattgcttccagataattcatataaattgcggattttccaaagccatggtgattcatatagaaacagcataaagtcacaagcttgccagccttcaccaacttctttgtaagtattatattcatgagtgatatcacagaaaagttgaagcgcattttttaattgcccttcagttaaatcagaagtaataacttcagaagggatgttatcaccaattttagaggcttggaataattgaccattattgtaaaactgaacaggaacagggaagagatcttcttctttttcaatttgtgatgtatctgcttttgcctttttgtcttgacgaataatgtgctgagtcaagctatataaatcttgcccgattgtatctagcttacgtcttttattgccaccttcaccaaataaagtaactgtttgagaagcaacgagtttttcattttcagataatttctttaattcatcatctttgctgtagtggtcgcgatacttttttatctcttcagctgggagaataattatgtctttaccagttgaattaggactgtttttgatttcaagagaagaatcttgcattacatgaatgcgaagatcgtctttatttttgtcttctaaataaccagatagttttttagcattaatataagttgtagcctgattaaggttatcttgaaacatttgttgatagcaattgaataatggatcagaagtattgccgtaatcccaaactaattgttccatatttttattaacagccgtatcggtaagattcattgaacctgaaaaggcagagtacttgctttgattttccattaaataaagcttagtgtgaatcaaattctgtttggtgaaaaaaagctgtaaactaccatctaaaatacgtttagtgaagggactatcttggtgttcgtagctatattcaatcaaatcacgacgtttatttaaaatttggtcaattcttttgccaattgaatttgatccattatcggttagtccaagaattagtgtgatctggtcaaaacgtggtataagattttgctcaataaatttaatattagaaacaaaggaaacgcctttaaactcagagaatttatttgactctctttgaaaatcaactaattgccaaaaatcggcattggaaattagtttttgatcagtatgatttagtatttctaatcccatataaaatcctttcgtgagtatacaaacatttgcttttagtgtatcgtgaaaaattggattagagcaaggaaaagttaatttattattgaatttatgaattagattaagtaaaatctgattcaaataacggaagtaaaaatataataatacgcgtggtgctagttaaatcgttttagttaataaaaaagtccaatcggactagactcaagttgtagtatcaaaaagaaaagagtctgatctgattgaactgccttaagcttaagcgttttagccaccatttacaagttagttttaaagatttagtgataatttgtcggcactggtatcgtttgtatgcaccggctgagtttactcatcggcgaaatattgatcaaattaaaactacggacagtctgattttggctttacttatctggcaagctaagacaggaattgaatcacaaagaagattctgtgaatgtttcaattgtttatcacactcacgttttaatcggcgttcacgtcagctattgcaattgatttatcagatacggcaagaaatgaataaaaaggttgacctgaatggacatttcttgatcattgacagctttccggtacctgtttgccaaccaattcgcaactatcgtgctaaaatttttcgcggttatgccaacattggttataaggccaccaagaaaatttacttctatggtttcaaagttcatgccattgttagcgatgacggttccattcttgattatgtcgtaacaaaagcatcagttcatgatgccaaggagacagttgaactgctggaaaatgcccatccatctaattactatcttcttggcgacgaaggctatttaggcaaagaactgcatcaacagctaaaacaaatgggttatgaactttggacaccatatcgtaaaaatatgacaggagctaaaaagcacaatgatcatcaattgatggctattcgcagaacaattgaaagcgacttttcgcttctgacctattacaatgccgagaacaatcgagcacgtagtctgataggctttcaaagccggttggaaattgcaattttagcttataatttggcttattgtctagaacgatttaactagcaccacgcgtataataatatgttatcggaaactgtcaaatcttttgtgtaaatagttctttctcgcaaattgattttttaattatttattcaaaataagattctaaggtatcctgaacctgaccaaagcctttatgaattcggttgaaatagcggtcattgtagctcattgcctggatgccaataaatgcatcaagcgactgttcagttggaaattctgccttaggcttagctttacgcttgatgacgttgttaaaggattaatcatattggttgaataaattgaagctctgatttgtttgggataattgtagaagaccagcagatcgggctcaatttccttcaaacctttgatgacattgctataagctttattccatctggcatagaatttgtgcaagacagctgcagcttcttttttgcttgtctgttgatgtatctgcttgaattcgttcatgatcttttcgcggtcatccacccggactttagcacagatattgcgcatgacatgaaccaagcagcgttgaaaatgagctttaggataagtcctggccaaggctgttttcatgccaacaacaccatcagaaagaaagagttcaacttgcttcaagcctcgggatttcatgttttgaagcatatctgtccagacttcaatgttctcgctaggtgcaatgcagtagtcaatgacctccttgtgcccattaggcttgatgccaatggcaatatagactgcttcacgctcaaatgtttctcggcgcaaaggaaggtatgtcgcatccaaatagacgcagaaaaacttgtcgcttagcttgcgtttgtggtaagcctcaacctttggaatcatctgcttggaaatatttgatacctgagctggactgtaatggctgccatacatcttttcaattagatcggctatttccctggtggtcacgcccttggagtagagcttgataatcgtgctttccaaaacatcagagtgctgcttgtagtcaggcagcgtgtgctgatgaaattgaccgttgcgatcccgaggcacttgcacttcaattgggccaaattgcgtatcaactttgcggaaataagcaccatttctagagttgccagtattccagccatttctggcatagggatcatagcccagaaaggcagtcaattcagcttctagcaagttattaacagcctgttgtagttctttgcgcaataaatcatttattttgtctggattgaatagagcttgagcaaaatctttggtaaaatcattcatgaaggagttcttctttctgtatgtgtttttttgttcaaaccaatcatacgagaaaggaactcctttttctaatgtttaaagaaataaatttaaggaatcattcatccttacacaaactattttacagtctctgttatcgctttggagaaaattatgacaacagtatattttgtaagacatgctcaacctgatttatcagttcatgatgatttaacacgtcctttgacagaaaaggggttgcaagatagaaaaaaagtaactgattactttagagataaacacatcgaccaagctttttctagtccattcaagcgtgcaattgatacaattcaaccagttatagacgagaagaaactaacattatcatctatttctgactttagagaaagaaaaattggtgatgagtggatttctaattttcatgaatattgtgaaagacagtgggaagattttgattataagctaagaaatggcgagtctttaaaagagacgcagaagagaaatgttgctgctttgaagctagttttgtccaaatatcaagatcaaactatgattattggtggacatggtacagcaattggatcagtaattaattactatgatccaagctttaaatatgaagcctttgctatgatccagccaaagaatccatttattgtgaaaatgaactttgatggagaaaaatatttggagtataaagtagttactttttagtaaaaagataatctcataaagtaaaaatggtaaatcaaggtactaataaccagatttaccatttttttatttgttatattatagcttatgttaaattttatcctgagcaatgaaattatcataaatggttttgataactacttcttcatcttgccgtctggtaccaatcataattgagatttgggatgcaccctggttaatcatttgaatggagatgttctttttaccaagagggtaaagcaagctagcacataaagtcagcttgtccttcatcccttcacctaccaccattgtgattgcataatcatcaatccactgcatttgatcaggatttagactagtttgaatttcattacagataacatcaattaattgatcagttaagacatcttttttgaaaataatggtaatatcatcaattccagatggcatatgttcatatgaaacatgatgtttttgcaaaatttccattaacttcaaggtgaaaccagcacctttatttaacatatattttcttaaataaagggccgcgaagtttttgcctccggcaatacctgtgattgtgtgtttaggtataaagccgtcctctggtacgatcattgtcccaggtttttctggagcattagtatttttaacattgacaggaatttcgccttgaatagcaggaattaaggcttcatcgtgaaagacggaaaatcccgcataagatagttcccgcatttcttgataagtcattcttttaattggcttgggctgatcaacgatatggggattggctgaaaaaatagcatcgacatcggtgaagttttcataaagatcagcgtttaaccccctagctagaatagcaccggtaatgtcagaaccaccgcgagagaaagtagcaatatgtcctgatggtgtaatgccatagaagccaggaaaaatgatcttttcatcttttgcagccttaattctttttaagttcacataagtttcaggattgacttcagcattattagaagtgccagtgacaattaaacctacatcttttggctctaaaaatcgtgctttaattccttgatgatttaaaattttagcaatcaaaattgcattaagacgttctccgtgtgctttaaaggttgccatgcggtagtcattattagggtaacttagcttcggcaatgtaagtagaagctggttaatatcctctaattctgcttcaggcagctcaaaatattgggcaattaattcataacgcttaaaaatacgggtagcgatgtcttgataattattactcctcaagctcatatatgcgtaagtgatcattagatcggttactttaatatcatcctcagttcttttgcccggtgctgagactacaacgacttgtctttcgggatcggcattaataatacttagggccttatctccgctattacctgaggctagggaagaacctccaaatttaacaactttcatatctatttttccttaattattatttcaaatctaaaattgaactgatttctttttccatatcatttggttcaataattttttcggtcttgggttcacgatcaaaaagggcacgcacaccgattgataattgaccgcctaattcatcatgcaattctttaattgcaccgacgccagtttgcatactaggaccaccagtgatggcttcatacaccgtttctgggaacttatatggactggctgttgaaacaatgaccattggggtttgatcgccggtcttcttttgatattgatttgctacaaaagagccaacagcagtatgtggatcaattacatagcggtcataattgtagacccgtttgatttctgatttaacctcttcttctgttgcaaaaccagctgcaaaatttttttgtaatttagtgaaaacttcaccgctaacttgataatgaccgcgttgagtcaattgattcattaaactagcgacttcatagttattttcgccataaaggtcaaataaaagtcgttccaaattgctggaaactaggatatccattgctggtgcattggttaaatggaacttacgtcgcttatcgtagacaccattattaaagaaatcagtcaatacattgttttcattagatgcacaaatcaactttttaataggcaaacctaatttcttagcataatatccagctaggatgtcaccaaagttacctgttggcacagcaaagttaacttcgtctcctagtttaatttcttgtctgcgtactaattgtccataggtgtagaggtagtaagaaatttgcggaaccagacgaccaatattcatcgaattagctgaagaaaattgatagccattagcattaagtcggtttttgaaagaatcattgttgaagatttttttaacttcagtttgagcatcgtcaaagttacctttgattgcaattgcacgcaaattgttgccgcgttggctgagcatttgcttaagttgaacaggactaacgccaccttcaggataaaagactatgacatcggtacccttttgattagcaaagccacgcattgatgccgtaccagtatcgccagaagtagcggttaaaataataatatctttatcaatcttttcaatttgaacagctctggtcattaattgtggcaacatttgcaaagctatatctttgaaggcaagggtaggaccgtgaaaaagctccatgtaaaaatggttatcgtgcttttcgattggaacaatgctgcgatcatcccattgttcactataagcgctttgaactgcagtggtgatttgctccttagtaaagtcatcaaagaataagctaataaccatggcagcgatttgcttgtaggaaagtttggataaatcttctaacttaaaattagcttgaggaaaggcaacaggcacgtaaagcccaccgtcttgagccaagccttgaataattgcttgaggtgcagttaaagtgttttcttttgaacctctagtactacgatattgcataaacaatcttcctatcttatgaaatattaatattataactattgtaccttgattagcacctatgatacaatcgtaaaaataagaaaatcattaaaaagaggataagatcaaatggccatcaaaattgcattgcttggattaggaacagttggttcaggtgttttaaaaataattaaaaataataaaaagaagattagacaaacaagtggtgaagaaatcatcattgaaaaagctctagtacgtaatccagaaaaacatcgtaatttagctaacgaagtgatgctaactacagatttcgattcgattttgcaagatcccgaaattaaaattatagttgaattaataggtgggcttcatcctgctaaggaatatattactgcagcaatcaatgctggaaaaaatgtagttacggccaataaagacttaatggcaacttttggttcagaattgattaatttagctgcaagtaaaaagtgtgatttaatgtatgatgctagcgttgcaggtgggatccctattttgcggaccttggctacctcttattccagtgacattatttccgaaattcaaggaattattaatggtacgacgaattatattttgtcacaaatgggggaaaagggactaagctacgaggaagcgctgaaaaatgctcaagagctgggctttgcggaggctgatcccactaacgatgttacaggtaaggatgcagcatacaagattgtaattttaagcaagtttgcttttggtactaagattagtattgatgattttactattcaagggattaataatctaaaggattttgacattaaacaggctcagaagttaggctatgtcattaagctgattgggattgccaaaaatattaatggtaaattatttgtagaagttgctccatgtttgttgccagaaaatgcgattatggcgcatattaaaaatgaactaaatgctttacaaattaagagccaaagcctaggaacagcagtattcacaggcccaggtgcgggtagctctgcaacggctaattcagtcatgagtgatgtgattactgaaataaaaaacgtagtgaaaaagaccaccggtcagccatttagtaatttctcccatgttatgcaattaacaagttcggaggatgtgaagtattcctattatttatctttcgaagcagaagagaccttgtttgatttgagtaaattactctctgatttggaaattccggttcgtgagattaaacaagtacaatcaagaattgtagttgtaaccgaaaatattagtcgacagcagctacaagatttagcgattcaagatcaatatttaaaagctagctataagattttgcagtaaaggaagggaaaaaatgattattaaagcaccagcttcaacggcaaacttgggtcctggctttgattcacttggcatggctgtttcactttatttggaagtagaagttttaagcttagccgatcgctttcaggtggatcatgtgatgaaaggaattccacatgatgaaaaaaatttaattgttaagactgcactaacagtttatccagggttaccaccgcttcatttacgcgttaaaagcaatatcccattggctcatggtttaggtagcagttcaagtgctatcgcagccggaattgaattggctaatcaaattggtaagctgggactatcagatgaagaaaaggttcaattaggagctaaaatcgagggacatcctgataatattgcaccgactattttgggcggcttggttgttggtgctgaagttaaccatcattttgatgcagttgaagcaccacttcctccatatgcgttggtggcttatgtacccgattataatttggaaactaagacagctagagcagttttgcctaaagaattagcttttggcgtagctacgcatggctcagcagttgctaatactttaattgctagtttgtttgctcaagactaccctaaagcaggagaattaatggaacaagatgtattccatgaagtttaccgagaaaaactagtgccagaacttgtaaaagtgcgggaggtagctcattcaaaacatgccttggcaacttatttgagcggcgcaggttcaacgattatgacgtggattgaagataaacatgtagctggatttttgtcgggcttacgtaaacatgatttaaaagatgagacattaatcttacatcctgatgaacacggtgttcaaattatccaataaaaagactgaccaagcggtcagttttttagtcgtcaaaggttgcagcaaaactatcaccatcgattagcattcttttagcattgacagcataccaataaggaataacttcagtgccattttcttgctctaattcacagtcggccatttttaaaatttggtctaaatttttagcactgatgttagggtagagcttcagtaaagcttcttgagtaatgccactttgtttaaagccactagtgggataattggcagaaaaaatatcagaaaaatcatctaagtcatatctaggcttaaattctccatcaaagtatttgatttcgatgttttcaatttccataaaggcaccaagttgttttgccatgtaagggaacttattagctagttgttcaacagtaaaaccattgtttgctttagttcgtgcattgggatccagtttaaaccaagcttcacgtatattatgactatcttttctttcaataagaaggtctttgactttttgaatagctgcattgtgtctgtttacggctttttgccagtctaatcgattaggatataactgtctatagcggacagacaagggatgatcgattgcgttgtagataaaattcagcttgtcagtggtataagaagttagttcatcgtcacgccacattaattcatagtaagaactcatgaaagacacctttctatttggatagactaattaatattaactgaatagtatcattttttgctccgattaacaaaagtgataaaaatgtctatttagattggtcagcagcaaaacttttgttaaaattaatgtgtttactattagtatttgctcaaaggatttgacaaactatggatcaacttgataagttcaaccgacgctacaattttctttcaaaattgtcagctgccttcttttattcaattgcggttgcagttgccttgaactttttttggacgccggggcatatgtactcgtcaggaatcacgggttttgcgcaattaattaatactgtaagtgaaagatatctaccgtttacattatcaacatcaatgatgtactttcttttgaactttcctttatttatattggcttggttcaagataggacataaatttactttcttcaccatcgttgctgttgttctaggttctatcatgatgcacgctattcaaccttggcagatgcacctggacccactggtttgtgcgatttttggtgcttcgatcaacggtattggaactgggatggcattaaagaacggtatttcaactggtggactcgacattattggtattgtaattaggcaaaaaacgggcattagttacggaaaatttaatatttttattaatttgattattatcgctgctgcgggatacatgtttggttggccacgtgctctttattccgccttgactatttttattaatgggcgagtaattgatgcggtttatacccaacaccagaagatgcaagtaatgattgttactcagcacccacagcatattatcgatggtattcaaaaccggatgcatagaggaattaccattttgcatgatgctgaaggtgcatacagtcatattgaaaagacagttttgattaccattattgatcgatatgatatgtatgatattcgccaaatcgtgcaaggagcagatccgtatgctttcatgagtgttagtgaagttgaaaaagtatatggtcgcttcaaggagcaagaaatcgtttaatggatagcccttaaaccttgatatataaggatttataaatgaaatttgaatcctaggggcactttgggagcaaaactattcaaaaagaagcagaaatgcttcttttttatttggagtggctttttgtaattatggctttattattggtctttgttaaaagtgattaaaaatgatattatttcgattgagggatgttgatatatcgtggatcatttagtgtattctccacgagtgtggaggtgatcctatcatcttgaagggcacgggagacaaggcagagtattctccacacatgtggaggtgatcctactgttaacggtgatgactggtatccagttagcgtattctccacgtgtgtggaggtgatcctactttgagctgtgtcaacgccacagccgtttagtattctccacacatgtggaggtgatccaagtcgttacatcagccaaaagatgaggcttaagtattctccacacatgtggaggctaaatagctgctctgaaaaatatgttctatagagtgactgtttttgtatattatttaaaaatattgttgatggtgcacggagattgcgttcacttatatagtgaaaagatgctaagaaatctaaaatagaatcgagatgaattggtaatctggtaatcgtaagaaggacttagctactaatcgttgtattcaattttgataacaaattaattaaagagcaaaaaatatgaagaattataaatttaataagtttatgtaaaaacagtgtcattaagttaggctattgattttggtgaaaaaacaattaaagcatcatttggctttagacggccagattgatgccctttttggcatatttttctaaatatcattcgcgttacacgtaaaagcgtgtgttgtatatagtgaaaggaggctaagagaatcggagctaagaggtgacaaatatgccgaaagcctataaaattaactcatactggcaaaaatactaaatggtcattaaagttctatcctaaaagagctttgttaactggtgttttgattgtgattgctatagcattatggaaagtgatttttaatggctaaatatacagaagtaaataaaaagtggaatgataaaaatgaggcccgtaagctttacattaataagaggtcaacgacgaaaaactttattttaaatcttgctatcgaagatgatttagaacagattgaaaaggatattgaagaaagacgcaataatttgtaaagaaataaaatgggatacatcaggtaataaaaagtgcatctcatttttatttgtatataatactagttaacttaaaaaagcaataaaattcaaataaaatggaggtatttcaaagaatgacagagaataataaacaagccaaaaccactgataccaaggcaaaacccaacaacgacacagcaatcttcgctggcggttgtttttggtgcatggtcgaacctttcgatacagttgacggagtagaaaaagtagtttctggttatactggtggtcatgttgctaatccaacatatgagcaagtctgttcaggtacgactggccatactgaagctgttgagattacctttgatccagcaaaaatatcgtatgatcaattgctaaactattattggcaagtgactgatcccacagatgcaatggggcaattccaagatcgtggtgataattatcgacctgtaattttttataattcacctgctcaaaaagaagcagctgaaaaatctaagcaaagattacaagctagtggtaaatttgataaaccaatcgtaactaaaattgaaccagctaagccattttatccagctgaggaatatcaccaagatttttataaaaaagatccacttagatatgcaatggaagaagctggtggaagagctaagtttatcaaggaacattgggattaataaaaagcagatcataactgttataagctgtgacctgcttttttactttcaatattttagattatgttaactatttctttaagttgcttttgataacctcgattggattgagccaagttccgttgttaacgttccaattcttacatggaaaaccatatttgtttatgtaatctttatttgtttgagtaacgccaaggtgtaagtgtgagccagttagcttaccgatcttttgatctaatttaatcttttgaccagtcttaacataaatgtcttttttcttattaaacccttcttggtaaacttcaacgtaattatcaggactaataacccagatgaaccagccaaggccgttgccataagcaacctttttaacagtaccttgatgaattgcatatacgttagaatgcccaacttctgaaaaaccaaaatcccaaccatcatgaaagtaggaaggtggtgtagtagaacgcatatagttagttatgccaaaagtttgtgcattatacattggacgaacaccatttttcttgttggctttaaacggataagcccacttgaggttcttgggttgaacttcagttgtattttgtgagtcatcaagcgtatcagcagaagcagtggtggttgataaaccaacgcttgaagttaataatgcagtacctaacaaagaaattattaatttacgaaatttcattataaaaagaaaccagataagttctgatttttatctcctctcttaattcacctaaactattgtagctcagcagttttacgagaaagttacaattaaatttcgattaataacaaaaagttagtatgagtatatgtgaatatgtttttaattacgagtctaggtatttttgaaatttctttactttattttgggatttacatagaattaaattaataacgtttacattgaatttagtaaatgatagtagacattaattgggctcaaaaataataatttggacgaaactgtcaaatcttttgtgtaaatagatctttctcgtaaattgattttttaattatttatttaatcaaagtaggattctaaggtgtcctgaacctgaccaaagcctttatgaattcgattgaaataacggtcattgtagctcattgcctgaatgccaataaaagcatcaagcgactgttcagttggaaactctgccttaggcttagctttgcgcttgatcacattgttaaatgattcaatcatgttagtcgaataaattgaagctctgatctgcttgggatagttataaaagaccagcagatctggttctatgtctttcaagcttctgataacatggctgtaaaccttgccccatttggtatagaagtcatgcaggacagctgtggcttcttctttgtttgtctgttgatgcacctgtttgaattcgttcatgatcttttcacgatcgtcgacgcgtactttagcgcagatattgcgcatgacatgaaccaaacagcgttgaaaatgagctttaggataagtcctggccaaggctgttttcatgccaacaacaccatcagaaagaaaaagctcaacttgctttaagcctcgggatttcatgttttgaagcatatctgtccagacttcaatgttctcgctaggtgcaatgcagtagtcaatgacctccttgtgcccattaggcttgatgccaatggcaatatagactgcttcacgctcaaatgtttctcggcgcaaaggaaggtatgtcgcatccaaatagacgcagaaaaacttgtcgcttagcttgcgcttgtgataagcctcaatcttggggagcatctgcttggaaatatttgatacttgagctggactataatgactgccatacattttctcaatcaagtcagcgatttctctggtagttacgcctttggagtatagcttgataatcgtgctttccaaaacatcagagtgctgcttgtagtcaggcagcgtgtgctgatgaaattgaccgttgcgatcccgaggcacttgcacttcaattgggccaaattgcgtatcaactttgcggaaataagcaccatttctagagttgccagtattccagccatttctggcatagggatcatagcccagaaaggcagtcaattcagcttctaacaagttattaacagcctgttgtagctctttgcgcaataaatcatttattttgtctggattgaatagagcttgagcaaaatctttggtaaaatcattcatgaaggagttcttctttctgtatgtgttttttgttcaaaccaatcatacgagaaaggaactcctttttctaatgtttaaagaaataaatttaaggaatcattcatccttacacaaactattttacagtctcatttggacaatgaaagtagagaataataatgacgaagttaaataatgaatatatggttggtctagatattggtactaattcatgtgggtgggttgctactgattttgataataatatattaaaaatgcatggaaaaagagcacttggctcgcacttgtttgatgaaggcgtatcagctgctgatagacgagcttttagaactactaggaggcgtataaagcgaagaaaatggcgtcttaaattgttggaagaaatttttgatgaagaaatggcaaaggtagatccaaatttctttgctcgtttaaaagagtcaggactttctccattggacacaaggaaaaatgtgtcttcaattgtctttccaactaaaaaaatggataaacaattttataaaaaatttccaactatttatcatttaagaaacgctttaatgaaacaggataagaagtttgatcttcgggctatttatattgccattcatcatatcgtgaaatatcgaggaaattttttgtctaattcatccataagtaattttagtgcgtcaaagattgaaatcgataggtttgtaaatgaactaaacgatctttattccatatttctgccagaaagtggagtgatttttgatgcaggaaatgcttcaaaagttgaagacattattcgaaatgaacaaatgtttaaactggataagataaaagaaattgctgatgtgttacccgacactgaaaataagtctggtctaaaactaagtaaaaaaatttcaaaagaaattagcaaagcaattttaggatacaaagcaaaatttgaaattattttacaagtaaatgtagacaagactgacagctcaatttggaattttaaattaaatgatgaaaatgcggatgtaaatttgagtgaaattacttctgatttaactgatactcagttacagatattggatttagttagaaacttatttagtgcaatttctctactgaatattgtcgatgaaggttcaactttatcggaatctatgataagaaaatataacgatcatgcccaagatttgaaattgctaaaaacagtaatcaagaaccattcagacaggaaaaaagctcacaatttacagttggcttacgacaaatatgtcaataaccgtcattttgttgatgttgaaactaaaaaagcctttcccaacaagcacctttatcgaaaaagcgatttttatgaaatagttaaaaagaatttggatgcatcaaaagaggcagttcaaattagaaaagaaatagcgttagataagtttatgcctaagcaacgaagcgatgaaaacggcgtaattcccttccagcttaatcaaatcgagctagataagataattgaaaatcagggaaaatattatccatttttaaaagagattaatccaattaaagctcatcgtatgcaggcaccttataagcttgatgaactgattcgttttagggtgccatactatgttggtccaatgattgaaccaacaaattcatcttatcctcaaactcgacaaaatcaatcttttgcttggatggttagaaaagctaaaggtcgaattacgccttggaattttgatgaaaaagttgatagacaaaagtctgcaaataactttattaaacgacttacaacaaaagatacttatttgtttggtgaagatgttcttccagcaaatagtcttttatatcaaaaatatactgttttggatgaattaaataaaattagtgtgaatgggaagaaattatctgttagcgtaaagcaagaactttatgaggacttattcaaaaagaataatactgtctcagctaagcagcttaaaaattggttaatagaaaatcagaaattgccttatatcaaaattaaggggttagctgatcaaactaaatttaattctagtttatctacatacattaaattaaaaaagtcaggtttatttgttgataaacttgactcaaatgaatttcgtgatgattttgaaaaaattattgaatggtcaactatttttgaagataagcagatttatatacaaaagcttcaaacaattgattggcttacagcaaaacaaattcaattcctacaaaatattagacttcagggttggggcagattatctaaaaaattgttaactgctattgtagattcaaatggtcaaaatattattgagcagttgtggaatagccaacaaattttcatgagtatagtaaataaagcagatataaaaggcacaattacagatgcaaatcaagatctcatgcattcaaatagtatggaagatattttatcagaagcgtatacttctcctgcaaataagaaaatgattaggcaggttgtaaaagttgttcatgacattcaaaaagctgcttctggtcaagcacctaaacaaatagctattgaatttgcacgtgaaagtagaagaaattctaagttatcacaaacacgagggcataagctacaggatatttaccaaaaaatatcaggagatatagtaaataaaaatttgaaggataagctggctgaatatatcaagaataatcaattaagtgtctgggaaaaaaatagcttccagatgaataaaaacgatcaagatttccttttttaagaatcttgatcgtttttttgttctctttaaaatttttaacaataaaaatcggcccttcagccaccttctttgacaatatttgttcaaattcatcatcataaaggcaattccgatatcggtttcgaccttctctttacctcgcaggtgcgttctgcgcatgccaaatacgttcttcaaatgtccgaaaactggctctacatcatattttctcatgccatagatgtgtctgccttcttcgctttggagaacttcttttgctttttcttttaaatattgccagttaggattatagcgaacttggcgctggcggccgctagctgttttagccaattgttccaattctggcgttagctggaactcgtctgcctcataaaccttaaaatcacggacctgaccagtagaacgatccttgcgctggctgtaatatttgaaattgaatctgacgccatgatgatcaatgtaataatcatctttttcattgtagtaccagttgattagcttagttggatcattcttatactttttggtctgttctttttcatacatagtgtagggaataaagtacttcttgtctggatatttttcctccagcatcgaataattgtattcactgccatagccagcatcggcgacgattttgtcaaacttgtccaacacggtcatttgatccaaaaccggctccaaagttttgaaatctgtcggattaggaaagatggcataatcaactacatattgatcggtcgtgactgcttgaatattgtagccaggctttaattgaccatttttcatgtggtcttccttcatatgcataaaggtggcgtcatgatctgttttggaataactgttgcgtccggcaaagatctcttcggcttcttcatatttttgcattcttggcacataatcttttcttagccggtgcagaatcttttttagtccacgtcgcttggcttttcgaggtgaaccgccaggaatggctttgttttcctgctcaatctctttagtcagcttgttaatttctgcttcagtttcttgagctaattcctttagcccctgactagtttgaactttttctttttccatttctttgactacttctttagtaatcaattcatcataaagttcaactgcctggcctttcagcttttcatgatacttttcaaccgctttgcgccagacaaatgtatagcggttagcatcagcttcaatcttagtaccatcgataaaagcagcaccttcattgattaagccttcatcttctaacaggttagtgaagtagataaagctctttttaatcagttcattggcatggctgcttgatctaaaattattgatagtatgatatgaaatcttttgctggtcagccaagatcatcattggaagattttcttccagcatcaactcaatctttctgccagaaaaaactcttctggagtaagcaaaaagcagtattttgagcatcatggctggatgataggctgggcggcccgttttagcagtcttgcctactaaaacatcttctggaattgaatctacaaaccagctgatgacattagccaaatgattggccggaatggcaaaatctagattaagtgttaaagcagtttgacctgtgatataatttttgtacatgttagtttccacctttttgtttttattttgtgatgatttaataatatcaaggctggagctaaaagtatacaaaaagagcgttgaaacaaaaattcaacgttcttttttcatgatctgagacttagttttttcccagacacttcatgcaacttggaagagatgcttatactggtaagccaattaatattgatgaagtatctcagtattatgacatagaccatatcttgcctcaaagttttattaaagatgattccctgaataatcgtgtgttggttgctaaaccaataaacaatggtaagtcagatggagttcctttaaaactctttggtgataatctagctactggtttagggataacggttaagcagatgtggaataactgggctgataaaggactgattaataaagcaaaacaaaataatttattcctagatccagagaatattaataaacatcaagcttcaggttttattcgtaaacaattagttgagacaagtcaaatcataaaattagcaactacaattcttcaagctgagtatccaaagactaaaataatagttgtcaaggctagttctaatcactatttacgtaatgagtttgatttgtataaaagtcgagaggttaatgattatcaccatgcaattgatgcatatttaactactatttgtgggaatctactgtatcaagcgtatcctaaattacggccattctttgtttatggtcaatttaaaaagtttagttctgatcctaaaaaaagaaaatgaaattttaaaaaagaccaaaaattttgactttgttgccaaacttttgggtagtaaagcaccaaatgagatcagatctcaacaggggaaagttttatttgaaaagaataaaattcgattgcaacttaataaggcatataattacaaatatatgcttgtatctagagatacgacaacaaagaatcaagagatgtttggaatgactatatatcctcgggctgaacgggatatagcgaagagtcgtaaattaattgaaaaacgtaaaggattttcaacagatatttatggtggctatactggtactgcagcagcctatatggcaattgtaagaattaataagactaaatcttcacagtacaaagtaattgctgtacctatgacgaagcgtgctattttaaataaagctgaaaaagaaggtaactatgaaaagattctaaagcaaattttatcaccaagtattttatacaacgataagggaaaacgaaaagcaggagtaatatcatttgatattattaaaggtaaagttccatataaccaggttgtgcaagatggcaataaaaaatttttgttaaagagtgctatttatttatgtaatgcaaaacagttggttttatcagaagaggcaatgagagtaattactggtcattggctagattctgataagcaagatcaagaacttttggatgtttacgatgaaattttagaaaagattgatagatatttacctttgtttgacattagagattttagaaataaattacataagggtagagaaaaattcttgaaattaaacgctgaggataagtttaaagctattattcaaattttgaagggtttgcatgataattctgatacaggtgaacttaaagatattggtataactgtaccatttggtcaacttcaaaataattctggaattacattatcttcggacactattttagtttatcaatcacctactggtttgtttgaaaaacgcgttaagatttctagtttataaaaataaatgaggaaccgacatgtggttcctcatttttacataaaaaaagtccctcgatagctcgggacaagtgttgaaactctgcgtactaaaacgcattgcttgattttaaattatgattgttagatcaataaggttaagagttgggagctacccaacaaataaataatatcattatagatatagatgtacaaggagaaaaaatgggatggcgtaacgtaataataactcagcatgcaaagctaacatactctatgaatatgcttatagtccaaacaaaagatggtattaatcaaatacctattgaagatatcaatttggttttaatttcaacatcacaggctgtgattactagtgctttgataagtaagttagccaaaaatcaatgcaaggtaatctttgttgatgataaatatcaacctgttacagagacagtgaattattatcctggggctagggacataaagaagttgaaaatgcaatttgaatggaatgaaagaagaaaagaaaatttatggaccaaaattgtagctgctaagctaaaaaatcaaatatcggtgttaaaaaattatcgaattgatgaaactgaagttgagcaagagctgtacaagttagaggtgaacgatttatccaatagagaagcagcggctgctagaaaatatttcatgaagttatttggtaaggactttattagaagaaattccggagtgattaatgcagcactagattatggatactcaatattgctttcatccttcgatagagaaattgcaatgaatggatatttgacttatctgggaatacatcatcattcagtggaaaatcaatttaatttagcttgtgatttaatggaaccatttagatccatagttgattattgggttaaggcacacgaaaatattaccagttttacaccagatattaagtatggattagttgagttgcttagcttacaaataaaattcaatggtaggaatacaattttaacgaatgcaatttctgtatatgtaagaagctgccttagatatttaagtggagaaacagatgatattagaatagagatgagtttgtgtaatgaggtaccgaatgatgcgattaatgataatgtttgatttgcctacggacactgccgctgaaagaaaagaatatcgacaatttagaaaagctctaataaatgaaggatttttaatgattcagttttcggtgtatgaaagagtatgtgtcactagacaaacagctaattttttagaaaagagaataagaaaatttatgcctagcaaaggtgttgtgcaaagtctaatggttacggaaaaacagtacagtgatatgcatttcttggttggggatgcagtaaaagatattcgcaatacttcagacaggacagtgatactatgattgtttcctatttgtcacataagaaaatctgtttaaaagatggaattaatgttatttgcactcaaagtcccattgcctataaagatctggttttaggttttcaagccttaaatgatctaatagtatgttctgatgacgaatacaacaataagtctattagtaagagttttgattttgtaggagccccgttgttaaatgacaatattatggcaaagtatatgaatgtcattattaagaactttatttctaacttggatgaggtaaacagaaatagaattttaaaatctttttattcattagaaacagtattgaatgattctttgcttttggaagatttacctttagaaattgattttagcgaagatattaaaaagctgttgaaaatggttaacattcatttagatgctcaattaatgttaacgagactgtaaaatagtttgtgtaaggatgaataattccttaaatttatttctttaaacattagaaaaaggagttcctttctcgtatgattggtttgaacaaaaaaacacatacagaaagaagaactccttcatgaatgattttaccaaaaatatagcacaagctctattcaatccagacaaaataaacgatttattgcgcaaagagctacaacaggctgttaataacttgctagaagctgaattgactgcctttctgggctatgatccctatgccagaaatggctggaatactggcaattctagaaatggtgcttatttccgcaaggttgatacccagtttggaccaattgaagtgcaagtgcctcgagatcgcaacggccagtttcatcagcacacgctgcctgactacaagcagcactctgatgttttggaaagcacgattatcaagctctactccaaaggcgtaactaccagagaaatcgctgacttgattgagaaaatgtatggcagtcattatagtccagcccaagtatcaaatatttccaagcagatgctccccaaggttgaggcttatcacaagcgcaagctaagcgacaagtttttctgtgtctatttggatgcgacataccttcctttgcgccgagaaacgtttgagcgtgaagcagtctatattgccattggcattaaacctaatggacataaagaagtcattgactactgcattgcgcctagtgagaacattgaagtctggacagagatgcttcaaaacatgaagtccagaggcttgaagcaagttgagctctttctttctgatggtgttgttggcatgaaagcggccttgaccaggacttatcctaaagctcattttcaacgctgcttggttcatgtcatgcgcaatatctgtgctaaagtccgggtggatgaccgcgaaaagatcatgaacgaattcaaacaggtgcatcaacagacaaacaaagaagaagccacagctgtcctgcatgacttctataccaaatggggcaaggtttacagccatgttatcagaagcttgaaagacatagaaccagatctgctggtcttttataactatcccaagcagatcagagcttcaatttattcgactaacatgattgaatcatttaacaatgtgatcaagcgcaaagctaagcctaaggcagagtttccaactgaacagtcgcttgatgcttttattggcattcaggcaatgagctacaatgaccgttatttcaatcgaattcataaatgctttggtcaggttcaggacaccttagaatcctactttgattaaataaataattaaaaaatcaatttacgagaaagatctatttacacaaaagatttgacagtttcatgttaacaccatatgctataattgaaacagttcttaagattcatcaagaatataatcttgatagtattcccgtgttttgtaatgtagctcattaccttgatgaaacacagttaaaagaacttagtaagattgttagacaacttaaattgaaaattattttaattgaattcacagataagaaatatggggtagcagtcaaggatgctcaagttgcatatattgatcgagatcttgttgattggtattagacaattgattaaaaagatattatgaaatatcggttttagatgattgttagatcaatgaggtttagatcagtagtctccaattcaaaaggtgcttacgtgttttagatgattgttagatcaatgaggtttagatctcgaatttagaaaaatcaacattaacgcgggttttagatgattgttagatcaatgaggtttagatcccgtgaaaacggcgtttacatgcgtaagacgttttagatggttgttagatcaatgaggtttagatctattagcttttgcggcggtaccaacgtacggttttagatcaatgaggtttagatctaaagaaataaataatagaggtgtgaggtagttttagatgattgttagatcaatgaggtttagatcccactatcgcgcctggaatacctgttttctgttttagatgattgttagatcatgggagtcagaacagtaatatgcataaatttacaaatatttttctgtaaataaaaatcgctctagagaaactctagaacgatttttggacatacttgatcttagtatctattattacttagcgtaatcatcaatacccaagtgctccaaaataagtgcggcagtttcttcaatggagcggtgagcaacattaattacatagcaacctaatttcttataaagtgcttgtgctgattcaagctccttgttgattgaatccatattagaataagtagtatcaggattcaaaccataagcgatcattctttgacgtctgatttcgttcaatacagatggatcgttagtcaagccaataatcttcttaggatcaatttcgtagatttcttttggaatgtgagtttcaggaacaagtggtaaattagctacctttaagttcttattggctaagaacaaagaaagtggagtcttagaagttcttgataccccaagtaaaacaacgtcagcttccaagaaaccttttggatctttaccatcatcatacattacagcgaattccattgcggaaattctgtcaaagtacttttgatttaagctatgctgtgcaccaattttttgatctggtgtcatatgagtagtttgttgaattgcttcaactacaggtgagaagatgtcaacacattcaacattatgctcacgggcaaatttgataactggcatttgcatttcatctttaaccaaactgtagataattaccaagtttggatatttttcaatttctgttaaaacttcgtccaacttcttttggttagtgataaaggggtaacgacgatagttgatattgcagttaggaaattctgcagctgcagctgtggcgttactaaaagcagtgtcaccagccgcatcagaaataataataatgtttaattcattttggtcttttgtttctaccatattaagctcctcgtgtattattaaatatctttctgaaaataattatactattaatgaaagcggattaacaataaaaactcagctcttttattaaggtaaagtagtcggtttacttaacttaaaaatttatcaaaaagtttttgaattgtattgaccctaaagattagtttggtataatttaagtaaatgtatggcgtaacgccaagaaatggaaggagggatcacacatggctaagacaatcgttcacgaaaacgagtctattgatgatgctcttcgtcgtttcaagcgttccgtttcaagaagtggtaccttacaagaataccgcaagcgcgaattctacgaaaaacctagtgttcgtagaaagttgaagtctgaagctgcacgtaagcgtagacattattaataaactactgagaaagctacctgtttttgggtagcttttctttttgacttcttgaagcataattttgattatgttaagtaaatatttgttagttttattttagttaagaacatagtttgttataatactattgggtttttaatagaaagaaggatattaaatgagtttgtcagatcaaatcatggctgatatgaaatcagctatgaagaatcacgacaagacaactcttaatactgtccggatgatcaaatcggccttaatgaatgaaaaaattaaagcaggacacgatttaactccagatgaagaattaactgttcttaatcgtgaaaagaagcaaagagaagaatcgattgacgaatttattaaggctaatcgtgatgatttagctgaagaaaccaaaaaagaattagcagttgtagaaaagtacatgcctaagcaaatgaatcaggatgaacttagagcagctgttaaggaaacaattgatgaagttggtgctaaaggtaagtccgactttggtaaggtaatgaaagctttaatgccaaagattaagggacgtgccgatggcaaggctgcttcgcaatcagttcgtgatcagctaaattagtagtaacaagaaggagcgggtctatttggctcaaacaacttttacacctcaaagaccagaaaatattcaaaaactagttggagttaatgacggaaatttaaagcttctttctgaaggttatgatctttctgtgtcagatgtcggtaatgagattgtcattgcaggagacgatgaagagaagatcaagaaggtagttgctgttctaaaggcactcgatagtgttgtgaatactggtgttaacatcggtgcgcccgacacagtaagtgcgatgaagatggctgacaagggtaccacagagtactttgcagacctatataaaaaggttttgattagggatgctaaaggtagacctatcagagtcaagaatatgggacaaaagcgttatgtcgaagctattgataaatctgatgttgtctttggaataggaccagctggaacggggaaaacattcttagccgtagtttgtgcaattgccgcctttaagaagggagaagtttctcgaatcattttgactaggccagctgttgaagctggtgaatcacttggatttttacctggtgacttgaaagaaaaagttgatccatatttgagaccaatttatgactccttgtatgctattcttgggactaatacgactgaccgtttgatggaacgaggcgtaattgaagttgctccacttgcttatatgcgtggacgaactttagatgacgcttttgtaattcttgatgaagcccagaacactacagatgcccagatgaagatgtttttaactagacttggatttaattctaagatggtcgtaaacggtgatatgacacaggtcgatttacctggtcgacagcatagcgggttaattgatgctagacatatcttgaagaatatcgaccaaattaaatttatcaacttttctgctaatgatgttgttcgtcaccctgtagttgcgaaaattattactgcttatgaaaaagaggacattaaacactaaaaatggatccaattgatattacttataatgatgaagttggctttttagatgatgaaaagcgtaactggcaagactggattatgaaacttttgctgctagctaagaaggaaattggcaaagataacaacttagagatgagtattaactttgttgacgaagatcgtagtcatgaaattaatttaaagtatcgtgacaaagaccgtcctactgatgtaatttcctttgcaattgaagatggtgaggattcaattgatcttgcagcatttgcagatgatccagactttcaagaggatatcggtgatctatttatgtgtcctagtgtgattaagcgtcacagtaaagagtatggtacaggttttgatcgagaatttggatatacaatagtccatggctttttacatttaaacggctacgaccacattaagccggatgaggccaaagaaatgtttggtattcaaggaaaagtgttagaagattatggtttgccattgtatcctgatcaattagatgaaggcagaggtaaataatggaagaaaaagagtttaagtctggctttgttgctttagttggtcgtcccaatgttggaaaatcaactttaatgaactatttagttggtcaaaaagttgccattacgtctaataaaccacaaacgactcgtaatcgcatttcgggtatttatacttcagatgaaatgcaagttgtttttgtagatacgccaggtatttttaagcctcattcaaaacttgacgactatatggataaggctagtgtatctagtttgaatgacgttgatttagttttattcatggttgaacctgaggaaatgggtaagggcgatcaatacattgccaacttgttaaaagaagtaaaagttcctgttcttttagtaattaataaagttgatgaaattcatcctaataagcttttgccaattatggattcatatcacaaacttgagggctttaaagaaatactaccgatttctgctactcaaggaattgggattgaagatctgcttaaaacgattaaggaatatttgccagtaggcccacaatattatggtgctgatcagatcacagatcggcctgaatattttgtggtagccgagttaattcgtgaacaaattctgcgactgacttcacaagaagtaccacatgctactgctgtcgcagttgatcatatgaatactcatcaaaatggcaagctcttgattgaagcgactatctatgttgagaaagacggtcaaaaaggcattattattggtaagggcggtaagatgctcaagcagattgggattaattcacgtcaagagattgaaagattgcttggtgaaaaggtcaacttgcgtctctgggttaaggtccaacataactggcgttctgaccctaactttttaaagcgaataggctatgacaaaaaagaactttagttgaattactgttgtataagcgttgtcgaaagatgacgtcttttttgtatgtttagggagacaagaaaattctattcgttggataactaatgggataaaaatagatacaatagtaatgacaaagtgatgaaattttgggatctattgttttgtgattgttgttatattgggatttgtttactgtattctccacgtatgtggaggctgaaacccagtttcgaagttgattctgggtaaagtcttggtattctccacgtatgtggaggctgaaacagcagtctttttgtactatagactatttatgatattatgatatcttcatcagaatatctataaaaaatgaattttaaatactaaaggagtcatgatatggcacgtgaactaaaagaagttcagggtattatctttaaaaggcagaaatataaagaagcagatttattagccaaaattatgactaaacaagatgggattatgactctgattgttaaaggagccctgaggcctaaatcaagattaagtgcagcaacattaaatttttctattggtacttacgtaatttatacgagcgaaaagggcttaagtaatttacgcacatataaaggggcaaggcagtttgatggcttatataatgatttaaccaagaacgcttatatttcttttatttttgatttaattgatcacgcctttgtagaatatcagccaattggtaaatattatgatttagctttatttgctttgaaaaaaatagatagtggcgttgatgcagaaatgattacacaaattgtgcagatgaaaatattagcagcatatggtgttgagccacagctaaagcattgtgttatttgtggtaaggaaaaaggcgtttttgattattcgattaaaatgggtggagttatttgtagcgatcattttagtacagttactagccgaatgcatttaaagccaaaagaaactgctgtaattagaacaattggcttattaccgattgagcgattaggcgatattaaaattaatgaagaaacgaagagggctactagaaaagcgattgatcgtatttaccatgaaacgataggcctaaatttaaagactaagaaatttttagatgaattaaaactttttagttagtaaaaatctggttttaccatgacccatgtgttaaaataaaaacgtatttgacgatgatgaggatttaagaaaagtactagttcagcgaatgtcggtcggtgtgaggacatctaggaaaaggcacctctagtcatattgttcaattaagagcaggaaggatacttcctgaattagggtggaaccgcgataatatttcgtccctatgcaaaattttgcataggctttttttatggcctagcgcaggaggagattaaaggaaatggcagataagaaattaaatattcagaatatgatctttaagctggaacaattctggtcctccaaaggttgtatgattatgccttcatacgatgttgaaaagggtgcgggtacaatgagtccttacacttttcttcgtgcagttggtccagaaccatgggcagcttgttatgtagagccttctagaagacctgcagatggtcgttatggtgaaaaccctaatcggttattccaacaccaccaattccaagttgttattaagccagctcctaaggatattcaacaatattacctagacagtttgaaagttttaggtatcgatcctttggaacacgatattcgtttcgttgaagataactgggctaacccatctatgggttgtgctggtgttggttgggaagtatggcttgacggtatggaagttagccaattcacatacttccaagttgttggtgaattagatgttaagccaactatgagtgaaatcacttacggtgttgaacgccttgcgtcatatattcaggatgttaactcagtatttgatcttgaatggggtaatggcattctttatcgtgatatcttcaagcaaccagaatatgaacattctaaatatgcatttgaagaatcaaatcaagaacaattgcttcaattctttgatatttatgaagcaactgctaagcgtttattggataagaacttggttcacccagcatatgattacattttgaagtgttcacatacttttaacttgcttgatgctcgtggtgctgtttcagttactgaacgtgctggttatttatcaagaattagaaatcttgcgcatgaagttgctgtcaaatttgtcgaagaacgtgaaaaacgtggcttcccattgcttaaaagtgcagaagacaaaaaggcgggggtagaaaatggctaaagattatttatttgaaattggtactgaagaaatgccagctcacgttgtaccacgcagcgttaagcaattagctgacagaacaagaaaatttttaaaagaaaatggcttgaaatttaaagatattaagactttttcaactccacgtcgtttgactattttggttgaagatttggctgaaaagcaagacgatattgatgaagttaaaaaaggtccagctaagaagattgctcaagatcaagatggtaattggactaaggctgctcaaggatttgctcgtggccaaggaatgactacagacgatatctattttgaagaacttaagggtactgaatacgcttatgttcacgttcaaaaggaaggtaagaaagctagtgatatcttacttggtatgagcgatatcattaaggcgatgactttccctactaagatgcgttgggattcaaatgattttgagtttgttcgtccaattcactggcttgtttcattatttggcagtgatgtaattcccgttaagattttggatattactgcaggtcgtaaaactcaaggccatcgtttcttaggcgattcagttgttttggccaatgctgatgactatgaagatgcattaaaagatcaatttgtaattgctgatgcagatgaacgtaaagatatgatcgttcgtcaaatgaatgaattagttaagaagaacaactggcaagttaaaccagatcgtgatttactagaagaagttacttatttagtagaatatccgactgtatttgctggttcatttgatgaaaagtatttgaagattcctgatgaagtgctgattacttcaatgaaagacaatcaaagatactttgaagtctatgatgaaactggtaagttaattaatcactttattgctgttcgtaacggaaataaagattaccttgataatgttatttcaggtaatgaaaaagttttagttgctcgtttggacgatgctcaattcttctatgatgaagaccgcaagtatccacttagtcattttgttgatcgtcttaagaatgtttcattccacgataagattggttcaatggctgaaaagatgcaacgtgttcgcatgattggtgattacttagctaagcgttgggatttaccagagaatgtagtcaaggatttcgaccgtgctagtgaactttacaagtttgacttagttacccaaatggttggtgagtttgcagaacttcaaggtgtaatgggcatgcattatgctcgtcttgcaggtgaggacgaagaagtttcagttgcaatcaaggaacactacatgcctgccactgctgaaggtccacttcctgaaactacggttggttcattattatcaattgctgataaaattgatacaattgtaaccttctttggtgcaggaatgattcctacatcatctaatgacccatacgcacttcgtcgttatgcatatggtattgtaagaatcttacttaatgagaagtggtcattaccatttaacgaagttttaccagaaatcattagtatgcttaatggtgtaactccagctaagctacctaagagtgatgctgaccaggaaattgcagacttcattcgtgatcgtgtcaagcaatacttacaaaagaatgacttcaagtatgatattattgatgctgttcttgcttcaagtcaacaagatccaagtcaaattttagcagcagctactgtattgcaacttcaccatgatgatgaagaattcaagccagtagttgagagtttgactagaattgataacatcttaaagaaggctaaatttaagagtaatactgctgttgatgaaagtctctttgatgataacagtgaaaaagaactttacgctggcgttcaaaacttgcaagatattgaaagtttggctgatctctaccaaggttttgttcaactgcaaccagtgattgatcaatactttgaaactaatatgatcatggctaaggacgaaaaggtcaagaataaccgattagcacaattatatgcagttaatgaattagcagatcgtttaggtgacttaagcaagttagttattaagtagttaatttagatagaaaaagggtgattcatatggctggacggattcctgaagattttatttcagaggttcgcagtaacgtcaatattgttgatgttatcagtcagtacgtttcgcttgagaaaaaaggcaaagactatattggtctttgcccttttcatcaagaaaaaactccgtcgtttactgtaaatgctgataagcagttttttaagtgctttggttgtggtaagggtggaaatgtttttaaattcttgatgtataaggatgatttaacttttcccgaaagcgtcgagcgagtagctgagtttgcccatattgctatgcctaatggatatggtcataatagtggcaccaaattaaatccacttatgcaaatgcatcaggatgccgttgatttttatcatcgtgtgcttttgactactaaagccggtgaacgggggatgcagtatgctcaaaagcgagaactagatcaagaaatattagaccattttaagataggctatgcacctaaggctgataatgttttgattacttatttacgtagtaaaggttatcaagatgatgatctagcacaaagtggtttatttgttcaagctagggatgggcagttatacgaccgttttcgtgaccgtttgatgtttccattggataatgaaaatgggagaacgataggcttttctggtagacgaatttctgatgataagaccgaagctaagtatatgaatagtcctgaaacggggatttttaccaagtcaaaggtattattccactttgcagaagcaaagaaagcagctcgtggtgaaggtcacttagttctatatgaaggttatatggatgtaattgcagcatataaagcaggggtgaaatcgggaattgcctcaatgggaactagtttaactgatgaccaaatatatttgttgagacgtattactcctaatatcattattaattatgatggagatgatccaggagtccatgccgaagaacgtgctgcacgtatgtttaataaagatggcaattttaatttaggaattgtagttttaccagaaaaactagatcctgatgaatacgtcaaaaaatatggcgctgagaagtatctggaagaagtcaaaggtgccttaacgccgactgactttttcttaaaacggttggaacaaaaatataacttagataatgaccgtgaaaagattgcttatttaggtgaggccgtaaaagaaattgcacaagtgcgcaatccagttgagcaagatatgtatactgaaaaattggcgaagtctagtggggtttctattgcttcgttaaaggcaaatcttgctaaagaaagacggcgaaataatcgggcacgcaatcatgtacgtaattctcaaagaaattcacctgattatccgatagacgtacctttacctggtgatgaagacgtgcctacagagcagtcagtagttgaaaaaaatcctagtcagaccagactcttgtatttatttattcattcaactgatgctcaaaaatatatgttagaagggcaatttcattttcctaatcaggattttgaaactctggcacaggattggttaaaatatgcggaaactcatgaaaatccacaaattgatgggttcttagattttattcctgagcaacttcaaggtataatagtagatgctgaaatggcacagatgccaaaagattctacaattcaagaagttgatgctttggttctagcattaaaaagacgcaacatctattccaggctgaatgagcttcaagctcaattacaggatgctaagcgcaaaaatgatgcacaaggaattattgcaatcactcaggagattattggattaaaacggatcttaggttaataaggaggctttttagtggcagaaaaagaaactacacaaaaactatctttggataagatggttaagcaagtcgtaaaagacgtaaagaaagataagtcgatcactgaagaagatttcactgctcgtttgattaagccttataacttacaaggcaaggctgtagatcaactagtacaagagtttgaagataatggtattagcattgttgatgaaaacggtgatccttcaaagttagccttaaagaaacaaaaggatgttgaaaaggctgaattaaaggatatgtctgctccatcaagcgtacgcatgaacgatccagtgcggatgtatttgaaggaaattggtcgtgtaccacttcttactgctgatcaagaaattgctcttgccaaaagaattgaatccggggatgaagaggcaaagcaagaattagccgaagccaaccttcgtttggtagtttctattgctaagcgttatgtaggacgtggtatgtcattccttgatttgattcaagaaggtaatatgggactaatgaaagctgttgataagtttgattatcgtctaggctttaagttctcaacctacgcaacttggtggattagacaggcaattactcgtgcgatcgctgaccaagcacgtacaattagaattcctgttcacatggtcgaaacaattaataaattgatcaggatacaacgtcaattgttacaggacttaggccgtgaacctacaccagaagaaattggtgcagaaatgaatatgccaaccaataaagtacgtgatattctaaaaattgctcaagaacctgtttcattagaaacacctattggcgaagaggatgattcacacttaggcgactttattgaggataaggatgcaactagtccagaacaacacgcttcttacgaaatgttgaaggaacaacttgaacaagtacttgagactttaactgatcgtgaggaaaatgttttgcgtttgcgttttggtcttgatgatggtcgtacccgtactttggaagaagtaggcaaggtatttggtgttaccagagaacgtattcgtcagattgaagctaaggcattacgtaagttgcgtcatccaagtcgctcaaatcaattacgtgatttcatggattaattataattatctatattaaaagagctaagttttacttagctcttttttattggactggatctttacctgctgcccttagattatcttcaatgattttcattggatttaaccaagtgccattatctttccaatagtatttgcatggcgtattgtcatgctttttatcaatgtaatctttatctgtcttagtaactcctaaatgaatgtgagagccggtcagtttaccaattttttgtcccaacttgactttttgaccttttttaacataaatatcagtaatactgaggaagccttcctggtaaacttcaacatagccatcatcggaaataatccaaatataaagtcctaaacctggggcgtatttaacacgatggacagttcctgcatgcacagcatatacggaagaatgtccaacttcactaaatccgaagtcatagccatcatgaaaataactcttgctaggatagactcgacgaatgacgtcagtttcaccaaacttttgtccagatttaaatttgattttcttttcatagagcttcttaaaagggtaaccccaagtaagatgaacgacttttttctttttagcagtcttctttttcttaaccgtgtgagtttgtggtcgtaaactattcagattgttttgccataagggaatagaggcaaaagctaaaatagcaattaaagcagctaaaagtgcaaacttactttcagtttttttcattaaaatagctcatctcgctttccgtcaagcatatgttcactaattgtttgttcaaaaaatactggtaaatcatgatcaaaattgtaagctaacttttgctttttcaattctttagcactcatccaggttagtttaccttcgtctgattctttaacggtacccgaaaattgttcagctatgtagaaaaatactaaataacgttcatcattgtgatcataaaattgtttaacaccaactaattgaggatgactaatcgttaatccagtttcttctttgacttccctgacgacagaatcatgaaaagattcatgcgcttcaacatgaccaccaggaaaagtaagtcctggccagaccggatcgttgcgatcaagaactaaaacctgatctttgtttttaaccatgcacatattagttaatgtgacattttctgttctactcatgtaaaaaacccgctttctgtgacgattatatcaaatagtagcaaaataagactatgaaatatgctaaaatttggttaaccatatcttttatggaggaaacatgaatttaagattaaatacgttggcaaagatggtagatcctggcagtcgagtggctgatattggaactgatcatgcatacttgccaattgaattagtaaaaaatggcaaaattgattatgcaattgctagtgacgttgcagagggccctcttgaaaatgctaaaaatgatattgcagcagctgggttaaccgagcaaattgaaactcgcttaggtagtgggttagaaaccgttactcatgctgatcagattgatacagttgtgattgccggaatgggcggcaagttaatgactgatattcttgatagagcttggagcaaagatgcacaatttaaaactctggtactagaacctaatataggcgaagcaggggtacgtaattggctgatgatgcataattataagattatctcagaaaaattaattgcagaggctgggcatacttatgaattaattaaggctagcttaactgaagaaaagcatgagatgactgaaaaggaaatcttttttggcccctttattgtacaagaaaagaatccagttttttatcagaaatgggaaggccaactcgcttattatcaaagattcctggttaatttgaataaagcaagaaaaaaagacgaagatcgaatcaatgaagtagatcatgatattaaattaatcaaggaggaattggagaaatgaccaaagtaaaagacattgttgcgcgtttgcgacaagattttccggaaaacattgcttcacaaggtgatcctgttggtatgcaaattggatcaatggaggctgatgttaccaaagtaatgactactttagatgtacgtccccaggtagttgaagaagctgttgaaaaaggggttgatttcatcgttagtcaccatcctgtaatgtttagaccagcacaaaatttggattttgcgaatgcacaaaacgcaatgtatggcaatattatcaagaatggaattactgtttattcaattcatactaattcagataaagcccaagatggatctgctgattggcaagcagaggaactaggtctgcaagatgttgaaccattttgtctggatgatgatggaattgctatgggtagaaaaggaaagttacctagaacaatgactgcttatgattttgcctattatgttaaagaaaaaatgcaaattaaaatggcacgtctgattactgcaaacaatgaaaagccaattaccagtgtaggatttatttgtggggatggtggtaaatattggactagagccttagatgaccatttagatgcttttattactggggatgtttattatcatgtaggccatgatatgatttcatctggtttaactgttgttgatcctggtcattatactgaaaaactatttaagtacaaggtctatggtcgacttaaaaagtggaatgaagaaaataactggaatgttggaattgagctttccgaggtttctactaatccatttcaagacttattttaattagaaagagagttatatatggaatatcctaatttgttacctagatttttaaagtacgttaaagttaattcgcgttctgacgaacattcagatcgctttccatcaactgaaagagaagaaaacttccaaaagaatgttattatgaaagatttggaagaattaggtttaagtgacattcactacaatcaaaatgctggtagtgtaatcgctgaaattccgtcaaatgttgattatgatgttccagtaatgggctttttagctcatagtgatacggcagactttaattcagaaaatgttaaaccacagattcatgaaaattatgatggcgaaagcaaaattcaattaggagattcagagttttatcttgatcctaaagtttttccacatttgaagaattataaaggacaaacaattattacggcctcaggtgataccttacttggtggggatgacaagtgtggtgtgtcagaattaatgacttttgcggaatatttaatgaatcatccagaaattaagcatggtaagattcgattggcctttactcccgatgaagaaattggtactggtgctgaacactttgatgttgaagactttggtgctgactttgcttttactgttgatggtgaagctcctggtaagttagattggggtacattctctgcggcacaatttagtcttgatattcagggagttaatgttcacccagctgttgctaaggggcaaatgattaatgcaattcaagttggaattgactttcataatcaactgccagaacacgatcgcccagaacataccgatggacgcgaaggtttcttccatctaatgaattttgctggtactgttgataatgctcacttagattacattattcgtgattttgaacgtgatgggcttgaagagcggaagaatttggttaagtcaatcgttaagaaaatgaatgatgaattcggtactgaacgaattacacttaaaatgtgggaccaatattacaacatggccgatgaattaaagaaacatatggacatcgttgacttagcgcgcgatgcttataaagcagaaggtcttgaagtcaatgaagacccggttcgtggtggtacagatggctcacaattgacttatatgggcttaccatgtcctaatatttttgccggagaagaaaacatgcatggtcgttatgaatacacagttcttgagtctatgtggaaagctgttgacgtgatgatcaaaatggctgaattaaatgctgaaagagctaagtaagtgaaacatttttgactaaaaatatcaataattctatttctgatctaatatgagattattgatagattaggaaatagggtaaacatagttaataaataaaaattatgcactaatactattaaaaataaaagatagtttataattaccgtcattataggattatagactatctttttgttgtacttttaacttttatgaacttgtgaaacaaagtgattaaacttagcccttgcaaaaagtgactaaagtaagtattatagttagtgtaatagattaataatacagtacaaaataggagctgagtaaatggaatttaaagataatattcctatttatcttcagattgaacaatacttgtatcgtcaaattgctttaggcaagttaacagctggtgagaagattccttctgttagaaaacttgctctagaattaaccgttaatgttaataccgtgcaaagagcactacaacagatgaacagtcaaggtattctttatactaaacgtggcgaaggtaattttgttactgaagatactaaactattatccgaaaccaagcagtcattaattaataatgaattagaacagtttgttcaaaatatggaagagtttggaataggaaagaacgagttagtttcaacgttagagaattatttaaaaaatggtggggatcagaatgaatgatttattagctattaaagatgtaagttataagaaaaatcagaagcaagtattgcaagatgtgaacttgaatttagctcctggcaagattgttgcgttacttggtgaaaatggtgctggtaagaccactttgatgcgaattattgccggtgtagctaagaattacaaaggcgaaattaatttagagggggcaacaaaagaggcagaaagaaaggctaagttgtcttttactgatggtttaactggcttcagcgattcaacaaagatcaaggaagtggttaaattttacgcaacgatttttcaagattttgatgagaatgaattcgatgagctgcgtaagtttatgaaattagatcctgaaatgaagttgagtcagttatcacgaggaatgcgtgaaaaattgattattgctttaacatttgctcgtaaagcagatttgtatttacttgatgaaccttttggtgggattgatgcaatggctcgaaagaaaattattaattccatcattttgtggaaagatgaaaaggcaacgattttaatctcagatcactttgtcaatgaaatttcatcattgcttgatgaagtggttattgtaaaagatcataccgttttggaacacaagtcagcagatgacattcgtcaaacgcataagtcaatcgaagaatactatgaaagtttttatgcagatgaggatgatgaataatgactagttttaacacattgtttaatcgaatgtttcaagaaaaaagcaagtcagtctatttaatcttcttaattcaagcctttgctagtttatgttttacaattattggttttgtttcggaaaatggtacaccagaatttgttaatggaaaagatactagttctgtcaatgtgattgttgcttttctcgctgtatttgcagtaatgatgctgataacgtcatttatcgctgattttgtttattggattatttcttcaatcaagaatgaaaaaattaatcgcagtcaaacttggcgcttgattccggtaactgatactaagtttttgcttagcaattttgggacagcatttttaacttatatttggttaggaattttagaagcggtcacgataatcgttacccttttgccgatgttgtctgatcaagatgtgcgcaaagcaataggtcaggctagcatccatctttcagcaagagactggcaaacaatgctcggaagtttgctgctaatcatttttattggctatgcttggtacgcaattgtaagtttgcttaacctagcaagccgcagcattattgattttttgccaggtggctcaagtaaagtatggacctttattattagagtaattgtaattattgcgattatttggattttaggccatgcggcaacaattatcttttcagtcttaggaaagtttagtccttttatggtcaacagccaggatattaactatgccactacgattcttcaattcttggtctttgatgttgtgattactttgatcgatatcttgcttttgaataaattcgtagaagcaaaacagaattaggagttttttatggcaaattttaagaccttgtttaagcaaatgtttgtgcaaaaaaggcgctacgctaacttagttttgttattacaagtttttgcagtcctttttttgctggtaatggctctgttagataaaagcaatttagcttatctcaacattagtaaggacagtaattggctagatcgtttgcttagtgcaggaatgctcgaaacgccgattgccgatgtgatttttgttggtctgctttgctggcaaaatgaaaaaatcaacctcagtcaaacttggcagctagctccagcttcaagtgtcaaaatctggctgattaatatgctttctagtttagttgaatgtatttatatttttgtaattcaagtcattttaggcttcgttgctgctatgattgataatttaagtcatcattattcactgcttcatgacttagttgatgctaaagttacttgggcagatgctagtttattaattgaatttctattgttcttaactggaacggttttagttattatgacttttgtcagttttgctaattttttgacgaaagtaattgttgatcaattgccagttaacaataatattgtcattaagttatttgtgatggcagtgattgtgattattgcaatcttgattgctgaacagctaaacgaacaaattactgctatgtatttgcatcgttttgccaaagaagcagcatatgatccattgggtatttcagtggttgagtactttgcaggagcaattgttttaggagcaatcgacagctacttaatgagtaaatttgtcgaacctaagataattaatcgttaattgaaggggaggggtagatagtgacgaatttttggaccttgtttaggcaaatgtggacgcaaaaaagaaaatttatttatttggttttcttaattaatatctttgctgtagtatttttatcaggttattttcttcttttcaaaaattggaatggtctagcaaatctgccgtctaaaaatttagggcaattctggcgcaataattttgtctatgtgactttatacattgattttgccttttgtgcgattacatgttggcaaaatgaaaaaattaatctgagtcaaacctggcatttagcagctagcgatgaacgaaaaacatacttagctaatatatttagcagtttgctggcatgtggttatttcttcttgctgcaagaaatcgttaatagtctgttgctgatccctagttgcggggcagacagttttgctcaagcatttcgtgagtttggtctgtatccaattaaaacagttcccggcgttgaaataactagcaatcgaatgcttgcttttcattggttgtttatcattttgataattttaatcatttacttctttgtcagctttgccaattttagttcgcgagtaattactgatttcttgccgtttaagagtacagtttgggctcgcttgttaattatcgcaattttggtaattgtcgcagcttactgcggcatgatctttatgtctaagttacagggctttgttgataagagtccaaatttacaagcaaccgatccaatctggttagatgatttatgcttgtttattgttagccttgttttcggtattttgaatctagtattcgtgaagaaatatcttgaaccaaaaatagattaattaatgcaaaaaaagagcttcatttcaatcaagaaatgaagctcttttttgtagttaactaagcatttgctgacatgtaatcataaagctgatttacttcttcggctgtgaattgtccatcgccaactttcatggcgtgaactttttcaactgagaggtgactagcaaaggctaggtcagtgtcattaacatggtgttttacttgaaaattgataattgcatcagataattcttcttgctcattcataataatttctccttaccctctaattttaatcaaattggaataaaaaataaaattttttgcaatttcattgattaaaatgttttccattgcgtaaatggccaatacctgaagacgactcggccaactaatgcgctgcgcttaacaaaaccgaagtaacgtgaatctttggaaacatcgcggtgatctcccatgacgaagtaactatccttaggtactcgcttttttaaagtgaaattgttagtatagagttcacctaatttatgtgactttctttggtagccattatttaaatatggttctgcaatttgtttgccgttaatgtaaagcttatcatttttagaagtaaccatatcaccaggtgtaccaataattcgcttgatatacagagcacctttttggtctggtgcttttagaatgacgatatcatttcgtttaggcgtaaaatgacgtacagcaatcaaacgatcgccattctcaaatgtgggctgcattgatggaccagatactgtttcatttgataggaaaaaactaaaaataaagtagtaaattcccatcaaaattgcaaacataataattatgtctaaaacaaagcggccaatgctttcatcatcatttctctttttggtttcaaccatagaatatctcctttgcttgctagtcttattataactgaattctccgccgttgaatggtaaaatcatattaaggtgtttaagtatgacaaaatttttgacgaaattaacaaaattagagcaagagataaatcatactgcggttaaacgacaagttgaagaaatagcattaattgatagttatgtacaagcaggtaagccattgaagcgggcaccacgcagattaggtttattgccagatgaatttgaagaagttttagttgaggtgggaccagataaagaaggggccttaagggatttaaataatttacttaataattttcggcaatatctctctttaatatatggcatctggtctctgcctaatattcagactgcgcagttaattaaaaataagctgcatgtacaaacagcgttagaaatcatggcaggcaacgcgtattggtctcaagctttgactcaggttggaattaaagttcacagtacagactcattagagtgggccaagacgtcgaccactggagctaagcctttttatccagtagaagatttaccagctgaccaagcaattaagaagtatcacacagttaatctagttctatgttcgtggtcaccaaatttcggtcacggagatttagaaactgtggcagcttggcataagtataatccaagttgtcatttgctctttgttggtgaaaaagatggtgctactaattcaccagaattttggcaccaaaattggtttaaaaatagtgcagctttagacgagattaatcattccttgcaaagcttcgattttattaatgaacaggtatttgaaataaaaaatgaattttaaaaagatatttttgttactgattcttttattatcttttttaggaattggaacaatgctctccaatattgaatctaattatgctgacgaattgctggaagcacacggcttaactaataatacccgctattttagaacagatagtgatgataagattagtactttcctaaaatatttggacaaaaattatgcgaatcatcaaattcaactgcatctagataataattatgaaaaaaaacaagtgcttgtttgggctaatcatgccgttactggcttgccaactgagagtggtcgctatttttcgcctgatgattttaaaggacaggtttcttttgtggtgctggggccaacagttaaacttaatttattagatgtgcagaataataaatatgttattttaggcaaaaattattattctgttataggcgaatttaaggactatccacaggtagaaatggataaatattatctaagtacaggaattgatcagccaactgctaaagaccagctcaagaattatcgaattgtagtagatgcaacacctgcagtgattgaaaagattgctaagcattatcatgctagtttgcatattccgtcttttgttcaagagcatcatcgagatcgtttatctgtcgtgccggatattttaatgttagttgtttgcctattggtcggaatgatcacaaatatgttgcttgcaataggaattaagcgtcaggctcgtttaacacgtctacacgatgatttgctgcgcaattgggtaattaaccgcagcgtacgtttatttttaatagaggctatttttgcccttgctacatacttctttttaagatggcatgccttttattcaacatatggttctttaatagttacattaatagcttcctgggttgtaattgtattggcgttttgtgggatggtctattacttagtgagaaaggacaggaaaattgctaaatctaccaaatgaatttaaaactaaatatgaaaaattattaggtaccaaaaaagcacaagaactatttgcggcgatgaatgaagagagcaaaaaagcttttagaattaatacattgaagcctactaaggtttcatatgagcttactgattcagtaccgcaaataaattcagcctattatggtgaagtatcgggggaagatcctgagtgggtaagcggtagtgtttattctcaagatccagcggctatgtttcctgcggcaattagtggtgttcggccaggagagcgcgtgctagatctgtgtgctgcgcctggaggaaaaataacagcattaggagaacaattgaagggtgagggccttttagtagctaatgaaatctctgcaacacgagtaaaggcactacgggaaaatattgaacgttggggcatcagtaatgccttaattactaatgaaagtccagaaaagttagttccaattttttcggaattttttgatgtgattttagtcgatgctccatgtagtggtgaaggaatgtttagaaaaaatccggaggcaattgattattggtctcaagactatgttttaacatgccagaaccgtcaaaaagagatcctcaatgaagctgttaagatgcttcaacctggcggacgcttaatttattcaacttgtacctttgcaccagaagaggatgagcagattgttagctggttaaataaagaatatggttttacaattttagatacagggatacaaactaataagattgatgttggacagcctgagtgggctgatgggaatcctgatttgactaaaacattacgcttttggcctcaagatggtataggtgaaggacaatttgtggcagttttacaaaaagtaggtaaagctagaattgaaaaaaagagcaaaaacaaaaaagccaagcgtgatccgtggcgcttaaccaaaaatgatcaggaactagttggtcaggtaatggatcagtttaatttaccagttgctttaagtgactggcgtaataaagcaaaagtccgtaatgaacatgtctatattcctgcaatcagtttgcctgaaaaaagtaagcttcatgtaattaataatggagtcgagttgggtatattaaagaaaaaacgttttgaaccaggacatcaattggcagaagtgctaggtaaggtaaagcaagaacgggtttatgatttaccgacaattgaagaataccaaaattatttgcacggtgaaaccgttaaagtggacagtgatttgcggggctttgtgttagtcagctatcaaaaattaatatttagttttggcaaaatcgctggtaatcaagtattgaagaacttttacccaaagggattgagaaaatgataaaactaattgcgacagatatggacggaacctggttaactgaccagaaagactatgataaagaattatttttgcgtgaatttgcggaaatgcaaaagcaggggattaaatttgtagttgctagtggcaatcaatatgctaacttaatgactcgttttcctgaggttttggataaaatttattttgtagctgaaaatggggcattagttgctcaaggaagacaaattttgcatgttgactcgttaagtgatgacatatatcaaactttattaaaaataactactgaatatccatatccagctgtagtgatggggctagtaagtgcttatgttaaaaagagcagtggacgagcttataaacaagaaatgaaaaaatacatggagcatattactgtagtagattcttttggagaaattgatgatcagattttcaaggtcagtctgacagtgccagaagataaaatgtctaaaattttgcgcgaattaaaagaaaaatatccggaggttggttttgtttctggtgcagcagactcgattgatatgcaaactaagggaatgaataaggcagtaggtctagcatatttgagtcaaaaattagggatcaaatcaagtgagatgatagcttttggcgatagcggtaatgatgtaggaatgctgaaatatgtaggccgtagttttgctactgcaacggcgttgccagaagccaaacaagctgcagggcaaattattggttcaagtaatgaaagtgctgttcaaaaagaaattgctaaattgcttgaaattaaataaggaaaattatgtaaagtaaaagcactagtaatcattaactagtgcttttactttacagtaactgatcgatttgagcctttaatggtaaattatagtatttttttatttgtaccagggatgctaaatcttttttgccgtaaacagcaattaaagcagccaattcatttttccaattagtaattaattgctctaatccagtactaccattttggatgtattcttgtaaaaaaacatttgaaataccaacaaattttcctcctagagctaaaccttttaaaatatctaggggattacgtactccaccagaaacataaaatttaacttgctcttgccatgccatcagagcagtcaccacagtaggtaaacctaaatcttctaagtatgaaacgtcactggcattacgtgcattctcaatctgggcaaagtttgtgccacccgaaccggcgacatcgaagtattcaatgccatttacttttaaaagatgaatacttgtttgatccaatccaaaaccgacttctttaataataatgggcaaatcgatagcggtacgaattgctttaattgaatcaagccaacgaaagtcacgatcaccttcaggcatggcaatttcttgtattgtatttaaatggatctgaagcgcatctgcatttaattcttggataatttgtttaattgcagagattggtgtttctggattaacattaacaattagtacaccatctggatcttctgctctggcaaccataaaactgtctagttgatcagtttccttagctaaaatgctggcagatcccaaagctagggcaatattttgctgctgggcaacctgtcccaatgcttgattaatttgtttagaagcagctgagccaccagtcatagcattgataaaaaaaggcgcagaaacatttttgccaaacatttctgatcccagaatagttggatcgacttttgtttcaggcagagcagggcgcaacaaatgcagttgatcaaaactattatatttttctttattaaaaaacatctgagctaacttcagatgttcttcttttctttcagatctaatcgacatagaactctccatcaatgagccatgataatctggtgaaccttaaaattaagaggcataattccattatggcgccattcgctttcaagtgcttcaacatcggtattagcatctgtaatcacaatgccacagtcaccattaccagcaccagaagttttagcagctccaccaaaattttctgcaattttgattaattgcgataaacgtggaatttcaatggcaatttggttaattttggcaaagtgctgcaacaatttacggttagcccgaatttgttgtttgattaaagcaatattgtttgcttcgaaaccttgaaccatctttaaaacacaagctctagaagctgctaagaaatttttatattccatattcaaagccgccttattagcgttagtttcatcaacgaggcgtgaagttgatgctggcttttgactccaaccaatcatcagtttcatatctttaggaggagttagtaattcaacttttaagccaggccaagcttcattaacgacttgaactaaagtcttattagctaattcttgctttaaccattttttgtcaaaagtttggtaagctaaccagccgccatagacactagctgcaatgtcaccagctgagccatttccttgaactgaatagtgtgaaatagccgataatttataaaccagttcattgctcatttttacgccataaaaacgcaagatagctttaactgtagctactgtgacggctgcacttgaacctaaaccatattttttaccatctgcagaatctaagtctgaattgacgtgtaaatcatagactttcatcttgatattttgctcaatacaatattgttcagtaaatgaaatagctgacaaaatatattcaaaagggttgtcacgattatcgattaccatttttgagccctgacgaacccaatgaatcgaatcctgtgagtattgcttggagtgaattaagccagttgcccctttactcttagtgattgacacacgtacaaattggttaactgctactaaaatagcaggacaatcttgctctaatactgcatattctccggcaatatataactttccgggcgctttttctgttatcaaaagaactaaatcctcgaatctaattaacttttttaattacaactagtccaaataagtaattccaggaccaaaacttgcattcactatattaacattattaaattcggacgaaaagcgttgaatgatatctttgctatttcttaattggcaaagtaccttaatatttggtcctgcatcaattgtatagtaacattcaattccttcagtacgaagttgttcaactaatttaatagcttgaatggtttgcggctcaaagtaagtgaattcaggctgtgcagttaaattaattgcatgcatttcatttgcatttaactcagctaactggcctagggcagtgaaatcattactttttatagctttgatcatttcatttaattctgaattgttgcgttcaagccagggcctgaaaaatggagaagattgggcatctttcataccataagtcgaagaaatctttttttgtttggtatttaattcaactgctaaaaggtgaagatccatcgttggtgtttcatctagtgcatatgcgtaagatgtttcgtcgctattacctttttgccaaacagcaaaaccgccataaacggagcggctggcagaaccagatccaatcctggctaaacgagataaatcttctagatcaatgttgatgtcatagcattgacaaaaagcagcagctagtgccgcaaaagcagaactagatgatgctaatcctgcagaagtagggacgtgattgacagatttaacgattaaattgccagtgacgtgaaaacgagcctgcaatttttttagataagcaaaaacacgttgactagctgcagcagtttgctgttgattatttaagaaaaattgattttcaccatctgttttttcaacgctagtatcagtataaaaagcatctaaagtcattgataaactagacattaaaggaagacgtaatttgtcgtcagctttgccccagtacttgattaaagcaatgtttgtatgtgctcgtgcggttctattcattaaatctcctcaatccagtagtcactaattaaatctttacatttagaggcaatttcttgggcgacagtttcgttatcgcacaaggaaatagtaatgccgccaagacctccgcctgataatttaaagcctaaagcgttatttgacaaggcaattttttgcagttggtcaattttatttgttgaaagatcaaatgagtgcaaaatttcttgtgcttcattaaaaatctgtccaactgcttgacgatcgtgcttgatccaagcttttttagtaagatccgctaattcacccaagcgagctatttttttcttggcatagtcggacttttcaagcatttttttaactaaaaaaacagcttcctttgtattgcctagttgaccagtatccatgattaacagggtagctcctaatttggtttgtaatattttaggccccatttttttattaaaaaaaactagataatctgaattaacagtggctgcatcaagaccagaagctttaccatgattgatcatttcagcatgattagttacagtcataatttctttttcagtcatattcagctgaaagaattggttcattgccctagtggtacctaatgcaacagtagcacttgaaccaaaaccatgttccattggaatttcaccagtgtatgtaattttaagtggatggttattgccagcctttttttgcatatgtttaactacgtattttaggccatcatattctgccggtgcttcaaataatggaccgtggtagcgagcggtatccatccacatttgagaagcagattcaacagtagttttaatgtgtaaagccttaattggcatagctaaagcatcatatccataaactactgaatgctccccaataataattaccttgccatgagctaaatagctgcttttcatttttaatcatccttaaactagatttatacaaaagattgcccttgctatgataaaataaaaagcaaggagtgcgaacaaatgatcaaaattcttacaggacgacaaaccgacccattacaagaaaaaattctggaagaagcagttgaaaactatcagcaacacccagaacaagaaacttttatcatcgttcctaatcatattaagtttaccacagaagttagggcaattaacaaattagcaacaagcaaacaacaaactgagactgcagttaaaaatttgcatgttttgtctttttcgcgtttagcttggtttttcttaaaagatgccgagcaaggattgcctaatcaactagatgatgcagctagtgcaatgctcttagctcatattattgagaacaaaaaagatgaattgactatttttgaaaatgttaatgttaattctggattagtaaatcagctttatcagacaattttgcaagtctatgacggaaatttagatttagacgagatatcagaggataatttagatcaagaaactaaaaataaattacatgatttgcggattatctatgatgcctttattaaagaaattgcgggtaaattctctactaagaatgaggttcagctgcaactaaatgaaattttagctaaaagtaaaaatttaaagcaagccagtttttatttctgtgatttttcacatttttcattacaggaaacactaacgattaaaattttgatgcgtaaagcaaaagatgtaatccttgcatttaaaacgcgcttaggtgaaattaattctagtgcggaagaaggagattatgattatgtaatccagcaaactattaagcgcttaacgctgttcttacaagagagaaagatggactacgtgacagcaacttttccgcttaattcgcaatcaaatggtcgtgaaatattaaatagtctttggacggagacaattcctaaagttgacgaattgaagcaggtacaattagttaaagcagactctcgatatgcagaggcttattttgtagcgcggactatttatcaacaggtagcactaagcaactatcgctatcatgattttttgattttagctccaaatttaaaggaatacgagacttatttgacgccaattttacgtcaaaatcagattccattttttaatgatttacaacaggaaatgaagtatcatcctctggttgttttaattgaaagcttatttaacttacatgagaatccgtttcaaacacaaaatatgctagccatcctaaagacacacttgttaataccttcttggtataaggaagaggcggagtatattcatgatgttgatgaactagagaattttgttctggctcatggtattaatcataatttatggaaaaaacactttgataattttgtgaatgctgaagtgatccgcttagacaaaatggatgatgaagtagctaagatcgatcgtttgcgcagctacttggttgataagatttcaacatttttcaaaataatagagcaagaaaaagatagtcaaaaggcgttaacgatattttttgagttcttaactaagaacggaattgccgaccgattagaaaaatggcgtgatgaggccaatgaagccggtgatttacagcaggcgcagcaaccagagcaattatgggatttattaatgcagctgttgcaagactatttagcaattaatcctgaaacttttgatttaaatgaattctttaatatgttaattagcgctttccgagaagcaaatttttcccaaattccttcaacacttgatgcggtaaacctttctgaaatggggatggtacaaactagcggctataagcaagtgtttatcattggcgctactgctaataatttaccccaaattcagaaaatgccaggttttttaactactgaaaacttgaatcagctacaaaatagttttaattcagaatcttacttagaagatagtcaacagcttaataacttagaccaaaattatcagtttggtttgtcgctagctttagcacaagatagggtatatgtatcttatccagtacttaatgcttcaaatgaagagcttgatccttcaatttattatcaacgtttaaaggattatggtgctcagcaatttgttcaacatgatttgccagaaaagatgcaggatcttttgtctttcattactaaccctgatgcaagtttaggctatttaacctatatgaattcaataaattcaggtcttgctgtgcaagagttattaaaaatcacacaggagcaactacctcaaaaaacgaagacagtgcttgaagcaagtgattttgataaccagccagaaaatattggtcaggacttggctagtcaattgtatggtcaaaacttgaattcatctgtgtcacaactggaaactttttatgaaaattcatatgaatatttcttgaattatgggcttaagctgcggcgacggtttgaaaatgaatttgatgttattcaggctggaaactattttcacgagacttttgaccgtttagtgaaaaaactaaacaagcagcataccgacttagcagatttaagcagcatagaactggaacaaatgcttaattcggtgcgaaatgtgatgaaggatgaaggaaaatattctcaattaatgaatgatccttttaatcaatatcttttcaagtgtctagaccatactacttctaaggtagctcataattggcggcgctccttgaaggaaaccccgttacgggctaagtattctgaattaagttttgggttaggtgaaaaaatcaaaggattaagcttaaaagtgccagatatatcaggtcaacataaagttgatttgcgcggtaaaatggaccgggttgatttggccaatttcaatgataaggatcaagttttagcccaggttattgattacaagtcatcagctaaaaaatttgatcttgggatgttttataacggaattgctttacagatggtttcttatttggatgttttgactaaaaatgatcaattttttgctggaaaagatcgtctttcattattgggtgctttttatcaaactgttactagacaattagaacgtttgaatagcaataaactaattgatagtagtttaaatttgaaaaagggagcaactgatagtaagcccaagctgatgtatactggcttaatcagcaatgatccagaaatcttagtagaagctgagccattacttgatgatcatcctagctattcttctgaactgtatactggggttaaaactaaggctagaggtggctttagcttgccacgtgaccgcaactttagtgaggaagaaattgaattactgctagaatacgatgagtatcttattcgacaagcatcaagccaaattttatctggaaaaattgaacttaatccatatcgttatggcaaagcgaagaatgccttaacttattctgattatcgtgatgtcttcttttttgatgcgatgctgcgtcaaaatcaatatcatgaaataaacaatctgaataaaaaagaattaattcttaaaatcaaagagaaattaggaaaggaacaataaaattgtctcaatttactaaagagcaacaacaagcaattgatgatcgtggtcatgatattctggtttctgcttctgcgggtagtggtaagacaactgttcttgttgagcgcgttttaagggagattctttcgggaacccaagttgatgaattattagtaattacatttaccaaagcagcagctgaagaaatgaaaactagaattaaacaggcattatcagctgaattagcaaagccgggatctaatcgcagatatttacgtgagcagctaaatcaagtggatactgctaatatttctacaattgatgcattttgtctagaagtaatccatcgcttttattactctgtaaacttagatccaagttttagtattctaactgatgatactcaagctgcattgttaaaagaacgtgcattacgtgaaattgaaggggagtttctagaaaagaaagacgtaaattttaggcatttttatgataactttgcaggggatagagatgcggatagtccgcgcgacttgttgctggatttgtatgattttgccatggccaaacctgagtatcgctcatggttaaaaaaattggttgatgtttacgtggttaatggcagtatcgtggaatctgatttgtggcaaaaacagattaagccatacttgcttactagtattggcgacttacaagggaaaattaatgattatttagaaaatccagtaatagaaacaaaagagctagctaaggctaaggaagcttttaccttgtttgcacaaaatttagatcattttgtttttgctttagaaaatgatgcagactacgataaacaacgaaaactattacgttcgtgtgtttttacagcgaattatcgtaagtcaagtaaatgggatgaagatgttctaaatttttatgaagacctacaaaagttaaaagatgaagcaaaaaatttggtttttgatacttttacttcattttttgctgttgatgaacaagaacaaattaaagtcatgcagcgcggccaaaagattgttgctgcaattgctaaatccgagctagccttgattgatcggtttaataagctgaagcgcagtgaaaatttgcttgactatagtgatatggaacaattggcttatcagattttgagtcaagatacatcgaattctcaaatggctcgtgaattttatcaaaataaattcaaagagattttgattgatgaatatcaggatattaatgctttgcaagaaaatatcatccagcaaatcaaaaataaagataaaaatacgcttttcatggttggtgatgtaaagcagtcgatctatggctttagacaagcagagccaagcttatttttgaaaaaataccatgattttgccaatgatgataataaacaaaccaaaagaattctgttgtcagataatttccgctctactgagccggttaccaaaattgtaaatcaagtatttaaaagtgtgctaagttcagattttggcgggattgactatcaaaaagaaggacaattaatttttggtgctaagtattatcctgaaaacactcctaaagctagtgaagtaattgttcatgaaaagaaaaatagcagtaatgaagatgaaaatgagatagatttttctgaaattcaaatggttttagcacgtattaagcaactaaaagaagagcgtgtacaaatctttgatagtaaaacaggaatgagagagttacgttacagtgatattgctatcttgactagaagtcgtagtgataatttggaaataatgcaggaatttgctaagcaggatataccattatttgtaactgatgcgaagaattattttcaaacttttgaattgactgttatgatgaactacttaaagatcattgataatcccgatcaggatattccattagtttcagttttacgttcgcctttgtttaattttggtgaaaaggatttagctaaaattcgtatcaagagtaagaactctactttctatagtgcattgacttcttatgtaggtgtaggagatgaattaagtactcgaatcaaagattttttaaatcaactagctgatttgcgcaagtttgccacggcacatcgtatttctgaattgatttggagcatttatgctaggacaaatttattagagataatgaccgcactacctaatggtgaacagcgacgagttaatctagaagctttatatgaacgtgctgcttcatatgagagtgcagggttcaagggattataccaatttatcaattttattaatcggatgcggcaaagtcagaaggacttggcacagcctttattaactaaagaagctggtaatgcggtcagattaatgactattcatggttctaagggactagaatttccgatcgtgttttatgtggggatgcagcataaatatcaaatgcgtgatttaaaaggtaactatgtgattagctcagatagtataggaattacgctccgtgaagaacattatcggattgactctttagttaaagcgatgggaaatgtaactaaaaaaaggcaattattagaagaagaagcgcgaattctttatgtagcattaacgcgggctaagcagaaattaattttggttggcgatgttcctaatctggataaacgagttaaagaatggtcgactgaactaaatcagattggtcaattatcattagcagataagttatcttccactagtccattgagttttatgggacctgcgttggctttagatcgacacctagctgtgaaaatgtctgatattactaattcgttggataagagtcagtcgtttttatatattaattatgaaaatgctaacggtgaactacctgattatcagaaagcggagacaagtaatgataaaacgcaaagtaaccttttaaatcaaaccactaaacggctttatcaatttaattatccgtttaaagatgctagtgaaactacagcttaccaagcggtatctgaaataaaaaaagcattcaacgatccgatcgagaccgaattagagaatgcccacttattgacatcgactaatcgttatttacaaccgattgatactaaacctaatttcttgtatcaaactaagtttactggtgcagaaatcggaactgctacacacatgattttgcagtattatgattatcaaggcaatggtgctgaagatcaactagaagtagaaattcaagaattgattaagcaaaagaaactgaatccagaaattgtttctagtttaaagaaagaccaaattgagtggtttgttcatagcaattttgccgaggaattttggcaaaagccagagaatttaaagcgagaaatagatttttctagtttaatctccgctaaaactttgtttaaaaacttttcagatcctaatgccaaaattttggttcatggtacaattgatggctattttgtcaaaaatgatggtattattttgtttgactacaaaactgaccacgttgatcaatcgcatttatctgaatcaattgaattgattaaagaaaaatatacaggtcagcttagactatatgaacaagctatcaatgaatttagtcaaaaaaaagttattggaaaatatttaattctgcttgatgctaaacaagcggttgaagtgaaatagaggaaggaggaaattatggcaaaaagttttactaaagatacatttgctgtagttgatctagagactacaggaacgcaacgtgagaatgggcatcatattattcagtttgggtgtgctattattaaaaatctcaaggtagttaaaacttattcatttttgatcaatccgcatcgtgaaataccacaatcagttgttaatttaaccggaattcatgatcaagatgtagcaaaacaaagagattttgattattatgcacccaaaattactaaaattttgcaaaatactgttttcgtagctcataatgttgactttgatttgccttttttgaattatgaactagtgcaacatggttatgaggcacttacaaataaagcaattgatactgtagaactggctaagattgcttttccgacttttccatcttataagttgagtgatttgacaacacaattggggattaaacatttagatccacataaggcagattctgatgcttatgggactgcagttttattgcttgaaatttttaataaattagaaagtctacctcaagctacactgaataccctcagttcattatctcatgggcttattcgggatacctcttgggtgattacaacgattgcagataatttacgtcaagaaaaacggcctttaggtaaagaatatatgcaagtgcgtaatattattctgcaaaaacaaaatgataattctgaagcacatggtgggaatgctaaattcccaaagactgactcagagaaacaaaagctatttaaagatcatttacactttcgtagagctcaagtcgacctaattaatcatttgcatcagtttattaatgatccagataaaagggcgatgctaattgaagcacctaacgggactgggaaaactttttcttatctttttgcttatgcttatcagctttattctggtagaaaattagttgtagctacaccaactaaagtgttgcaagaacaagtgattgaacatgaaattccgcagttatttaaggtgattaagttggatttgactgcagaagtagttaagtcaagtagtcgttaccttgaccttgacggatttgtacagacgatttttcaaggtacaccgaataagcaaaccttgatattacagatgcagatactggtttggctgactaagactaaaactggtgatttagatgaattaaatttaactaactataatgcaccactctttgcacagattcaacatccaggggatgcaagagtaggtagccgttttgcaggggtcgatttttggaatttagcgcgtaaacgacaagaagaagcggatatattggtgactaatcatgcttatttggctaaccactatatggatacaatttggggtcagaatccgtatttagtcattgatgaagctcatcgtttcacagacaatgtcgtaagttcgcgtaatgattctttgcgttttgaagctttgtggggagttttaagtcatctccgtaatttgctttatttctcagatgaaagtgttgaagcgcaatttaatgatgatgtgcagctgaaccttttactaaagaaaatagatcctaaaattttggaattaattcagttaattaatgaattacaaaagcaactttattttcaaagagataatgctgttaatcggacagttttagctaatggtaatctagaacttagttttcaaggaaaaagtttatttggcggaaatagcaagtttaaagcgattttacctaagttccaacaaaaattagaagaggttagggacttaactaatcaggttttatttgaattatataatgaacaagaacgcatgctggctaatgttgaggtattagtcaatgagattacggaacaaattgatcgcctagattattactctgaaaagggctatcaattggctgatttgctttctgatcaaaaaggtttagagcaagatggctttattttgatgattactaatcttgatgatccactaagtaccaatttagactggttaatgcttgatgctggtgaagtattaaaacaaatctatagtcgttttgaccatattgccttcgtcagtgctactttaaccagtaatcgaaattttgaatatgcaatcaaccagttagctttaacagaattacatccggttgaatatattggtaaaagtacttttaatataaaaaagcatttacaggtactggcagttaataatatgcctagccctgatagtgaagaatttgaaaagactattgcacaaattttacttagtgacattcaagataagcaccatgtacttgttttgatgactaatttagaaaaaattaaaactgtttttaccatgattatgaatgagccacagctaaaagattttgaaatcttagcccagggattgtctggttccaataaccgaattgctaagaggtttgtaattgctaaaaagtcaattataattggtgctgatagtttttgggagggaattgattttcatgattgtgggattgatactgtttttgcggcaaaaatcccgtttgaatctcctgatcaacctgaagttcgtttaaggcagaagaaattggaagatcagggaatcgattcttttactaaagatagtttaccaagagctgtcattcgttttagacaaggaatgggccgtttaattagaggagaacaggatcatggtcaatttgtaattttagacccaagattatggactaaagattatggtcaagagttccttcaaacgattcctgtcaaagttgaaaaggttactagagaagaattaaaaaagaaattagaaaataaataattatgttacaagatgatacaagacaaacaatcaagtttgtgagttgggtaattggtttgataatagttgcctttctagccagcattgctatcttttattatgctggatctagaagtcggggcaatgatcaaaaagttacgcaattggctactagtaaaacaccaattagaaagattcaaaactattatcatttagatcgcggcactagcagctatgctatagcaggcaccaataataagggaaaacaatattactttatttatttgccaaattctaaaaaggcatatctatatcctgcggccaaaggaatcactgaatctaagattaaaaataagtttaaatctatccatacggatgctacaataaataatattaatcttggttggtataagggtgaggtcgtttgggaagtggcctacaaaaaacaaaacggcaatctaggttatactttatatgaattcaaaaatggaaatgatatctcagaagtcgataatttatagaaactttggtattatggaaactgtataattgatgaaaaggtggataggattttatgacagaattgatttcaattaaagattcttctaaacatgttgatgaagaagtcaagatgcatgtttggttaacagataaacgatcaagcggaaagattatctttttgcaattacgtgatggtactgcatttttccaaggggtagtacgtaagaatgatgtatcagaagaagtatttgatgctgctaagtcacttagacaagaagcaagtttttacattactggtactgttcatgaagacgcacgttcacactttggttatgaaattcaaatcactgatttaaaagtggtttcaaacaatgaaggttacccaattggtaataaggaacatggtgttgacttcttacttgatcaccgccacttatggttaagatcaaagaaaccatttgctattatgcaaattagaaataccatgtttaaggctactgtagatttctttgaaaaagaaggctttatcaaatttgatgcacctatctttatgcattcagctccagaaggtactactcaattattccatgtagaatactttgaccacgatgcatatctttcacaatcaggtcaattgtatggtgaagccggtgctatggcttatggtaagatctttacttttggtccaacttttagagcagaagaatcaaagggtcgtcgtcacatgactgaattctggatgatggaaccagaaatggcttggatgcatcaagatgaatcgttagatattcaagaaagatatcttgcctacatggtgaagcaagttctagaaaataatgaatatgaacttaagattcttggtagagatcctgaaaaacttcgcccaactactgaaggtaacttcgttcgtcttccatacgatgatgcaattaaaatgcttcaagatgctggacgtgatattaagtggggcgatgactttggtgctccagatgaaggctatatttcagaacaatatgatcgtccagtcttcattgtcaactatccaacctcaattaagccattctatatgaagaagaatcctgataatcctaaggaatacttatgtgctgatgtaattgcaccagaaggttatggtgaaatttttggtggctcagaacgtgaaggaaattacgaaatccttaagcaacaaattcttgacgctggtttgaatttagaagactaccaatggtaccttgacttacgtaaatttggtggagttcctcactcaggtttcggtatgggctttgaacgtactattgcttgggtttgtcaccttgaccacattcgtgaagcaattccattcccaagattgattaacagaatgcaaccttaatttggttaataattaaatattgatacacaaagttggactagttattagttcaacttttgtttttgaaaggaaattattttggaatttaatgattatcgggcattaggctttacaaccttacaaaatggattgatcgcttactaccctcaattaggcattagtgatgctgaactaattttgataatccaattggaagcatttagccaacgaggtgagagttttccatctaatgaaaagattgctgctaatactaatttatcggttagtgatgtgggtaatcttattcagcggctaattgaacgaaattatttaactattgaacaaatgactgatagtcaggataaaattggtaataaatatagtctcaataagttgtataatgcacttgatcactatattgatcaaaacgtcttgatcaaagataagaaaaaagataaaactgtttcagttgctaataatttagaaaataatccgttaaattatttgtcacgaaaagtagaagttgaatttggtcgctatctgagtccaattgaacgagaagagattgcgcaatggttaagtgtggatcactatgctcctgaattaattgaacttgctttgcgagaggctgtattgtctcaggcatattctttaaagtatattgatcgtgttttacttaattggcaaaggcatagtctgaaaacaactgatgaagttgagagatttttgaaaaggaatcgataaaaatgacagaagatttattgagtgatgaagaagcacgtagagttttgaaaaaaattttagcattgtatcctgacgcacaaggtgaattgcaatgggatactaactttcatttactttgtgcggttatgttgagcgcacaaacgactgataagatggttaatcgtgttatgcctagttttagtaaaatgttcccaaccccagaagtattagcaaaagctccaattgaagagattgagcatgagataaaaactattggtctatttcgttcaaaagctaaacatttaaaggccactgcgcaaattttggtcgataaatataatggacaggttcctaaggataaaaagttattgatgaccttaccaggggtgggagagaaaactgctaacgttgttttggctgaaggctatggtgtgccagctattgctgttgatactcatgtgtcacggatttctaaaaagttccatattgtagatgacaaagctactccacatgaagtagagaagcgattagaagcaattttacctaaaagtgaatggataaaaacgcaccatgcgatgattctatttggtcgttatacaatgccagctcgagctaaaggcgatccgtattcttatttaaattccgaaaagtaaagccgaaataaattcggctttttttattgaataattttatataatctgttgttactaaattttgattttataatttcaggcctcaactacgtttcggccaaaataaaaacagataacaaaacgctatctgttaataaatatatttaattattgcctagtcattatccgaatcatcattacgttcatgtgattcttcctcaggttttctcgttgatgaactttgttgtgttgaagaagattgtgttcttctttgagaggaagaggctcgctgactgctattggattgagatgatgagccattttcacgacttgatgatgattgagtaactgcagttctagaagatgaaggagtagttccagtattatcgcttgaagtatcagtttcttcatcgtcttcatcataacttgctgcactattaccaattccggctggggtatggcctcgaacaaataattgccaagtgccgccaccagttgctaattctggaggattagagttatttacaattttcgctcttacaactgagctaggctgtttccagtctaggttaggcttattgttcattaggtaggtcatcatactcttatacattagctgtgcagattgttgacctattccagaaatagtaccgtcctttaaattatcgtaaccagtccaaacacccataacatatgatctggtataaccaacgaaccatgaatcttttggagttgaattatagcttgggtacttagctagatcttcatcagagtatttaacagtaccggttttaccagcttgataaagatctgcaatttttgcattagtaccagagcctcgtttgattacgcctttaagcatatcggtaatcatgtaggcagttgatttcttcattacacgtacaccatttgaatcataatttctggttaatccatctggtgtttcaatcttagaaacaaattgcggcttgtggtatacgcccatggtggcaaaagcactataagcaccagtcatttgtaaactagacgcattagcgccaattgctactgataaaccagattttggtgaaacattaacgcccattcggcgagcaaaagctgaagcccgttttactccaacttcagcaagagttttaatagctggaacattacgtgactgctccaatgcatgtcgcatagtcatcatcccgtcgtatttgttgtcccagtcatataattggatattggtaccaggataaacatacttactgtcatcaatcatttttgctgttgaccaattcaagtattgaatagcaggtgcatagtcaagtactggcttaattgacgaaccggtagagcgtccagtttgaacagcccggtctaatcctaattgaacagaaggtaagtgacgtccacctaagattgcaacaacatgaccattgtttggatcaactacagttgcaccaatttgcattttattgtttgtaaaaggtacagaaccgttgttagctaactcgtacagcttgttttgagctttttgatcgatattaatagtaatctttaaattatcgtgatatggatcaaagcctttgctcttaacttcagaaattacctctttaatgtatggatcatcaatttttctaatcttagactcgttattatttcgatgtgatttaagtcccttactaattggttcagcaactgcttgattgtactcagctttagtaattttgtcattttgtagcatagtctttaaaacaatatcacgccggtatttggccttttgcggataaagatatggatcatatgcaacaggtgcattcggcatccctgcaatcaatgcagtttgtgccaaatctaacttacttagtggcttaccatagtagtagttagaagcagtacccatgccataatttccatagttcataaagactttattaatataaaattctaagatttggtctttactgaattcatgttggactttcatagctaaccaagcttcttgagcttttctcttcagagtacgttgagaagcagcagtagagaagaccgttagcttaactaactgctgggttatagtagaaccacctgcagcaatactattacttttggcattagttaacatagaaccaataattctaattgggtcaacgcctaacttatctttgtaaaaacgtttgtcttctactgaaactacagcatcttttaattgctgaggaatgtctttatttttaacataaattcttttttcagaaccaagtgatagtaaaaacttaccattattagtatatagacttgaagatttaccactctgcaattggtcctgactaatgttaggagcatctttggcataaaaagcaaaaagcccgattccagagattactattaaaaatatcagcaaaaagatccatttaatgattctaatccataagtggccactacttggccttcgaccatgatagtctcttcgtgattctcgtttcatattattgttattatctgccatgattatcttttcctatctgcaatgaatttatctaccgccttaagataaggcagtgtaggacgaaagccacttttgatttcaaaagaattgttttcaatttcttttaaagtcattgagcttttatctttttttcgccaagctcgaattacaaaactagctggagtaacaaagtagcgctctaagctagcgaacctaataattgtaaaacaaattccttgttgttttaagcattcgtccaagtgaaaaatttggtgttcatgaaagttttttaatgggaagttagttttattccgtgtttcttttgcctcaaaatcgagatagtatcctttataaacaccattatagtcagttgttgaagcttgcctaaagtaagcttcacgaatgaccgccttagaacgtttgggataatcaactttaacaatttgaattggggttggctttttatgaacaactgcaatttcttccattaaataatatttattagattcattgatttgttgctcaagtgtcatcccacgatcagaaaagttaacaccttttttatgatgatatgatcggtgaactggatgttcatcttttttagttacaggttttctaaatgcggctaaactaccgctaggatatttgaccattgtcctcactcctgttagcattatagcaataaagactacatttttgaacataaaggggggcttaaacaaatgcagcgtttatgggtgactggctatcgcagctatgaattaaatgtttttggcgatcgtgatcccaagataactgtcattaaatatgccctaaaaaattatctgacaagtctactggatgatgggcaattggactggattattactggagctaacctcggtgtcgaacagtggacagctgaggttggacttgaattaggagaaaaatatccggtaagaacatcaataatgattccatatgaagaatttgctaatcgatggaatgatagtaacaaagctaaattcttaaatttgaaggaaaaagtggacttttttgcttcaacttctaataccccttatcaaagtccacttcaattacgtaattatcaaaattttatgattcagcatactgatcgagcattgatgatctatgattcagagcacccaggtaaacctaaatatgattataatttaatccaaaaataccaggaaactaaagaatatccattagatttaattgatttttatgatttacaagatgcagctgaagaataccaagaaaatcatcaaataaatcatttttctgaataatatggtaaaaattttattaaagtctgtttctttattttcagtcagcgttgtttttgctaaaatagggtggaatgtaaaggagttgtcagtaagatggcaaatttaaatgatataaaattatcaggacaagatatattaaagaaacaattcaaaagtaaagtaaagggatatgatcccgatgaagttgatgcatacttagatgaagtaatttctgattatactacttttcaacaaattatcgaagatttgtatggtcagatcggtacgctccaacgtcaattaatggatgaaaagcaaaaagcaaagaaaacagttgaggctgaagaagaaaaggttaagacttatatgccaacgcatagaagaagtgcgcctgtgaagtttgcagaagatgcagatgatactcaaggtgaaatttcgactaatatggctattattcaacggatttcaactttggaaagaaaagtttataatctagaacaacacgtttatggattaaagcattaatttttgctataatgactaacagtgtgaattttgagtaggcgcggctagcttatgttagctgaggaaagtccacgcacacacagactgcgatgtttgtagtgatcgtattcagcctaacaagctggaggaggacgttagtcttcacggcggaaaaagtgctaaatcttcggacatgcattactatcctgaaaagtgccacagtgacgaagcaaggtcagaaatgactttggtggaacgaggtaaaccctgcgagtgtgaaacccaaatttggtgggggagtttcggcctaaggaaatgaactaaaggtcggattattgctttaagcagtaaagatagatgactactgaaggtaatctttgccagagattattggaacaaaacgtggcttatagaaattcacacaggcagagttgggcttttaggtccagctcttttttattttgaaaatgaaagagtaacaatgaaagaataccaactttacgcaactatgggcgctggttttgaaagtgtcgttaataaagaattacagtctatggggtataagacccgtgttgaaaatggtcgtgtcttttttaagggtggtcaagaagatatagttagaactaatctttggctgagaacagctgaccgaattaaaattttgctaaaagagtttagagcaacagattttgataccttatttaatgagatttatgattttgattgggccgaattattgcctgttgacgctaagtttcctgttcaaggtagagctgtaaaatccaaattgcactctgaaccagatgtacagtcaattgtaaaaaaggcaattgttaataagatggttgaccagtaccatcgtcgtggctttttgccagaaactggtaatgaatatcccttagatattcatatttataaaaatgtagctcgaatttcgctagatactacaggcgctagtttgtttaaacgtggctatcgagtagagcatggtggagcccctatgaaagaaaactttgcggccgggctattaaaactaactccatataatggtactcaccccttaattgatcctatgactggttcaggaactttagctattgaggcagcattaattgctaaaaatatagcaccaggaacctggcgtaaattttcctttgatggttttgactggtttaaccctaaactacataatgaagtattggcaaaggctaagagtgaagttaagccgcttgaagcaccgatttgggctagtgatattgatcagtctgttcttgaagtagctaaattaaatgctcacaatgcaggtgtattgcaagatattcgctttaaacaaatcgcagttaaagactttactactgatctagaaaatggaattataattgcgaacccaccttatggtaagcgattgaaggatcgtgagtcggcagaagagctgtatcgccaaatgggagaagtacttagaccgcttagttcgttcagtcagtattacttaactgcagatcctaactttgaaaaatgttttggtgcaaaggctactaagaagcgcaaactatttaacggaaatttgcgggttgatttctatcagtattgggctaacagaaggtaagaaatgattacaaaagagcttaacacagaattttgggtgatctcagatacgcacctaatcgcagatagtttacatgatgaaggacaagccttttcacgcatgcaaaaaactagtcaaggtaaggatttgtattatcaagaaatagccctttctgcttttatgcgaatggcacaaagaaaaaagcctgccgcaattattgtaactggtgatgtgacatttaacggtgaacgagtttctgctgagaaatttgctcaaatttttaagccgttgaaagaaactaaagtgttagttttacctggaaatcacgacatttttgatgggtgggctagagaatttcgtggtaaaaaacagttctatgctggtgaaattagcccaatgttttggcgctcgatctttgataaatcatatcgtgaggccttagatgaagacgataattcattggcttacagtgtccaactgaatccgcaatatcttttagttttagcggattcaaatatttatggaaaagaagagacaacagaagcaccgcacactcacggcgaaattggaaaagtacaattaaaatggattgaaaaacaatttcgttatgcgcaggaacatcagttacgtccggttttatttatgcatcataatttatatgcacataatccagcagttaacaagggctatgtagttgatgacgctgttgagctacgacgtttgtgtgcgcgttacaacgtgaaattagctttttctggtcatattcatgctcaaaatattatgggaccacaagacatgacgcctacaactgagatcgttacatcaagtttttgttctaatgatcaaggctatggagtagtgcgagttcattcacggcacattacatatgtgcggcgtaattttgatatgacaagatatttaacggatgaggaaaaggaaaattatactttagttcattatcataagtatttaaaagatctacagcttggtagtatttctgcggatatgatgcaaagtgaattaaatcagtatcacgaagacatcgagttagttagggcgatggggaatttgtttggctggatgaactatcatttctttaatggtcataatcatataaaggctagcgagttgaataaaatccatgcttctaaagaatatcaagttttgattaagcaccatcctgagtatcggttatatctaaagacgctgtacgacacaagtgatcactctaatttacaagtgaagatacgatactaaacaaattttagtataatggatactgattctaaagaaagcggacatgattatgttaaaagatgaaacaaaatttgatcaattagggcaaaagctttttatgaaaggtgttttgcaagacttcgaaaagaaaaatggtccaattaagggcagaatgatggttacagaaggaaagattccgccggaaatgttaactaagctgcaatctgaattgatgaatagtagtaattggattgtagttgaaggtagttttgatttttataattatactgtcggcatgattgtagatttgactacaggtaagccattagcaaatggatggttggtaccacaattgggtcacccagggatgcaacctgcagagaaatggcaagaatttttgattgaaaaagtcgttgatgcaatcgatgaaaaaggtaagattaatttgccgctatatgtttggatttcagatcgtagtgatttgaccaagacggatcaagatttataaaaatatttttaattatgtaaagcttaaacaaaaaggtaggtcaattttgacctaccttttttaggatttatttattagtattaagaagttattgaattaagtaagtagatattatttaaccagtttaattttcaaagtgagctagttattaattgcctgagcagatttttgagcatcccaccaatcgggtaaatcacacaataacttatttaatgtattattgcggtgcgaaattgagtttctctcattgagattcatttctgcaaaggtttttcctagttctggaactacgaataaagcatcgtaaccatagttactgctaccatgtggatacttagcaattaatccactgattctaccagcactaacaatatcattgctttcttgacctggccaagtaaagacaaaggtagtgtagtagctagctgtccttttttcactagaaactccacctaaatagcctaataatttagctttatcatcttgaccattatggtggtaaggcaagattcctaaagagttaagtagataatcaacacttagacctgagctttctgataatgtaggcaaattggtaaattcagctaaacgatgtgctgtagctctagcattacttaaaaatgttgcctcagaatatgacttttgtggtgcataatctacttcagctaaaccaactactttgataggaagactaagctggttaagtttatcttgtaattcattaattttattttggtcatatgttgtaaataataaactatccattattttccccatgctttcaaaaatagatataccatttatattgtatccgctttcatatactgcacagtcattgtcttatctttgtgaagtaaagtcaagcatagataatagcttttatcaaaaagtccatatacttcaggtttttaaactgaataatgttatttttaatgactaagattgtgaaaattatagaaactgtcaaatcttttgtgtaaatagatctttctcgtaaattgattttttaattatttatttaatcaaagtaggattctaaggtgtcctgaacctgaccaaagcctttatgaattcgattgaaataacggtcattgtagctcattgcctgaatgccaataaaagcatcaagcgactgttcagttggaaactctgccttaggcttagctttgcgcttgatcacattgttaaatgattcaatcatgttagtcgaataaattgaagctctgatctgcttgggatagttataaaagaccagcagatctggttctatgtctttcaagcttctgataacatggctgtaaaccttgccccatttggtatagaagtcatgcaggacagctgtggcttcttctttgtttgtctgttgatgcacctgtttgaattcgttcatgatcttttcacgatcgtcgacgcgtactttagcgcagatattgcgcatgacatgaaccaaacagcgttgaaaatgagctttaggataagtcctggccaaggctgttttcatgccaacaacaccatcagaaagaaaaagctcaacttgctttaagcctcgggatttcatgttttgaagcatatctgtccagacttcaatgttctcgctaggtgcaatgcagtagtcaatgacctccttgtgcccattaggcttgatgccaatggcaatatagactgcttcacgctcaaatgtttctcggcgcaaaggaaggtatgtcgcatccaaatagacgcagaaaaacttgtcgcttagcttgcgtttgtggtaagcctcaacctttggaatcatctgcttggaaatatttgatacctgagctggactgtaatggctgccatacatcttttcaattagatcggctatttccctggtggtcacgcccttggagtaaagcttgataatcatgctttccaagatatccgagtgctgcttgtagccaggcagcgtgtgctgatgaaattgaccgttgcgatcccgaggcacttgcacttcaattgggccaaattgcgtatcaactttgcggaaataagcaccatttctagagttgccagtattccagccatttctggcatagggatcatagcccagaaaggcagtcaattcagcttctaacaagttattaacagcctgttgtagctctttgcgcaataaatcatttattttgtctggattgaatagagcttgagcaaaatctttggtaaaatcattcatgaaggagttcttctttctgtatgtgtttttttgttcaaaccaatcatacgagaaaggaactcctttttctaatgtttaaagaaataaatttaaggaatcattcatccttacacaaactattttacagtctcgattaatcaattaataaaaaaataaaattgtattttaataaaaaagagaaaatcttttttagattttctcaattatgattaactagctattaaaaatttccataatgcattattggtgtaccagttttgcggttgaattgctcctagacaggctacaataatataaattgctaatgttgagattatgaatgcaatgcctaagttgacaatgttgaatggaaaggtagttttatgttgtttcattgcgatgtgaatggcgaaagccaacagaaccaaacctataataattccaaattgataataaatgctcattttctctcctaagttacagttaaaagtatacgttaaaatcggattaaagagtgatttttatttatctagcctctttattttatcaaaatcaatgttatattagagaggtagaaagaagattatgtacatatgtctgtagatatttacaatgaaaaacttgaaccatacgacgatggtaagcgtcataaatttagtggtacttttgatagattaaacgatcgcttagctatttttaaggatttgcgtattgcaggtgctggtggcaatccaattgttaagcagttagcactgcattacttgaaaactttcaaagaccttgatttgaagaggggcgatgtagttgaatttgaaggcatggttgaaaaagattctaacaatggcttcacaattgaacgcccaactcaagcagaaaaaatcagatcagcagctgccgatgatgctaaagttgacgtggttggcgatgattggaattggtttgaaaattagttaacggaagtgacttacgagatgtaagccgcttttatttttgaaatttaagtcatagctagaaatgtagtaaaattaagcttgtaaggagaattagatgcactttgatatctttaatcgaaaaactgtctcaactgataaaatgtttttccagacaacattaaatcctaagcaagcaataatcattggcaatggtgctaaatttcgacgttgggttttcttttctactaattttgctacattttatgtaatcattctgtcagctattagtattttattaattaagtctaatgtttctgtactaatttgcttactattagcattagcaaatttagtaattaatcgctcaatacctcgttattggcaaactttctttggcccgaatgctgaatatggaaaaaatcatcgtccagctattttgcctattttatatatcataaccttgttcggttggctttggagcgtatcacatttcgtaggatctttaacttttattactggtacatttgtgctagtaggtcttgcaggtagtttgttatcgctctggatatggatgaatttgaatactgttagttgtgctccaatcagtgaattacaatggcgaaacaatgccaaacgcaggggaatgtctgatgaagacattgataaggttattgctagtttaaaaaagcgtagagcaatatattttagtaaacacgataaataaaattatagacgaaagatagaatttaatgacagattttacagaatttgaaagtacaattttttcatcagacgataattttgccattcgaaaaattaaacataatgtcattttgacgtattgcactcaagatggtgaaaaagaatatgaaagcctaagtaagaatacatatcgtgtattttttgaaaataatcttgaagttagtcgactgtatccacctgatgaattcagtcacaattggctaatccaaattttaatgccgcaactttcaattgattcgctcaaatctatggcgattgccttaactacattagaaagaattgcgcaaagtcaagaaggcatgcaattatctgaatatgttaaaaatagtgagttagtagaaataaagtcctggtttgatctgcgtaataagttgcgaaaaatatccaaagcttatagcctaattaagcaaagtactgatcaaacaacacagtggctaggaagtgatggacatcgttatcgtgaagtgattttagccaatagtttacggcttaattatggtcaagatgaagttgttcgtttaattccaattaaaaataattgggttattcagtttgttaaaactgatttcagtgcaactgatggcgtaattgatcagctttttgcggcattaacattattgactcaatatgtaaaacaaatttaaatcagagatgaaacatattctttatgcccttaatgggacttttttaatgttactcgttccggctttatttgtattagcattacgacaattaagccatgaagctaaccaaaaattggtaaatacatttggttttaatagtcaaattattgttggcggattaggaattattgttcatgaacttagtcatttgattatggctataatttttggtcatcatattaatgcggttagtttattgcgcatccctagtaataccaatgatatgtcacttggctatgttaaacatacttggtctcctacatctacttatcaaaaggtgggtaatgcttttattggcattgcacctgtattaggatgcaccttgctgatttacataatcatgcgtacattgaatacacctatttcattggttcagaatcagcttactactcagttattaagtaatggtaatgcacttaactggaatttcttaactcatagttggatttatatttttgaattatttcagcttaattttgattcaatatggcactcaattgttgctttattgctagtaatcagtctatgttttggtggattcgatttaagcgaggctgatataagtagtggcaaatatgcttttttaggattaattggtataacctttattatgcttctcttagtttcttttctaggctttcacgctgcattattaccgtttttagttaatattactgtctggatttatttggtattcattatatcaatagtgattttagcaataattaatttaattatgtatattttaaatattattttataaaggagaaaataatggcaaaagcgttattagttatcgactatagtaaagactttgtagctgatgatggagctcttacttgtggccagcctgctcaagcaattgatcaacgtattacagaactgtgtaaacagtttctacaaaataaagattgggtgattttcccgatggacgcgcacttaaaaaatgatccatatcaccctgaaactaaattatatccaccgcataatattattggaactgctggccgtgaagtatatggtcaaacgggtaaatggtatttagaaaacaaagataatgatcatgttttattaatggataaaaatcgttattcagcttttcaaaatactaatctagataattatttacgtgaacgccatattcatgacctgacactaactggtgtttgtactgatatttgtgtattgcacacagcgattgcggcatataatttagactatgaaattacaattccacgttctgctgttgctacttttacatcaaatggcgatgaatgggcaatggctcactttaaaaatgcattaggtgcgaatattgctgattaatttaatggcctgcataatttactagtaagtccaattattactatctaataaaaatatacattataattaatgtaaaggaaaaagctatgtaaagtgaagaggtcaaaatgtatacaaatattcgtaaatttaaaaagggcggaaactacccggaacagcaaaatgggctaccacaagcattttttcataatcccaagtataagaagttaagccccgatgcatgatacctatacatgatacttacgatgagaatgattgattcacaaaccaatggatgggtagatgctgacggtaatatgtatattatttattctaatcaagagctaatggatgacatgcattgcaattcttatacggtgaaacgactaaagaaagaattggttaatcatgatttgttactcgaagaagatgctcctgcagaacatgatgataggttatatcctttaagaattaatgaaaacgaaaaatgataaaagacattggtaaatacggccaatgtcttttatttagtattagtaaagaaaataactaatgtatccgcatcaggataaggctctgaatgaacacttaagaaattttgcagtttatgattgtattcaatattattttcactttgactattttgataaatttgctctagccagctcggttagccggataaatagcattgttcatggcggaacctacagcgttactttgaacgtcatttagtaaatatgatgtcccaatttgattaatttgattgagtaaatgatctatgcgttctatttcctgcttcttatcatgtacgtttggcacaagcagtagagagacggctgtaatatccatttcacattgtgcccaaaatttatcataaagcttgctaaagttttgatctgattgagctaaaagccattcctggtagatttttaaaatacgaattgttttttgaatatcatataaataaagcttacgataactaaactgctgaaattttcttgtaattccagaaagtagttctgtatagcaatctaagtcttcagcaattttaattgccgagtcatttttatttcctttctgtattttatttacattagctgatacttatataagtctatatgataatactgtactttctatacttttattataagatcatcgcatgatttgttaataataaaatgctcactaaaaatgttgtgacaatttattattaacaactaaaaaattatgatagtgtaagtagtaataattatgaaagagcgtgatgtaaatgtctagatggcatagattatttcctgaacgagtttttgatcgtggagaaatatattatggcaatgatatggttgaaaatattcaattagctcaagatcaggaacactttaccgctcaagttcaaggcggaatgggtcgttcttatactgtaactggtcgtcttcgtttagatggtcgagcttcagagttagactgtaattgtccatgggctaataaagggcatcgctgtaaacacgaggttgcggctttacttgcagtagaaaacgaacaagaaaatgaacataacgttaaagtcccttttgctgacttaatttctgaacatcttaagcaaatgattgcacataaaagcccagtacttaaccccttaaatttgattggcaatatgaaatttaccaaaaaaagttatgatcaggcactggaacttaatgatcactggtcgattagtagttgtcggcattttgatgataagatgcgtaaatatgaatatttttgggagatagtaacagaggacaatgagttaattacattatctgtgcaatttactcgctggcaaattatatcaattaaatttgatagtgatttttcccgtattgaaaaagatagtgttagaatattagctctgttttactttattaatgagtatcttgatgacgatccatttgatttaactaaccaggccgctgaagatctacttgaattttatagtgacgcttctacccaaaatgatgagccgattattttgcgggcaagtattgataagtataataacatccctagtttgacgtttaaattaggaaagaacaagcatctttataaagttaaagatcttaatcaactagtagatgcatcccgacacagctcttctctaaagctaggtaagtttttcaacgagcctataaatcaggctaaaatggatattgatagtcaacactggttatcttttattgaaaaaattatagatgctcgtaatctaaacgaagaattttattataattacagtagtcaggttggtcgcattacactagagaactctgtggccgatgaagttaatgatttactttatcaaggcgtaaagttgtactcaaatgagcagcctataggatatacaactgatcaactagatttaaacattaaaattgaaactcaaaagtcatctgctttagttagtgtagaggatcttccagtttctactataattactgggagtcatgcgtattatggctattacaaagatgtatggatcaaatatataggtcttacgcctgcttctttgcataatttaggattgcagcctggtgctgaaatgcaatttagtaaaaagaccgttgctaagtttgcacataatattttgcctaaatttgagcaaacaaagtttatattagtgtctggtactgatgaattgaaagctattttgccaccagaggcccattttttgtttaaattagattatcgtgtaggcagtattttatgtgtggctcgagtacagtatggggatgcacaatacgagttaaatcaaggatatactgaagaggaccgacgcgatgttgaaaaagagaccgcagcatggaagcacattaatacatattttagtgattatcagcatgggcggtatgttttatccaatgaagactcggatgtcgtacaagcttttctagatgatggtatcaatgagttgaaacgattaggcgaagtacaaattacagctaactttagatcacttttaaagggaataaagattaatttggatgttggagtaggtatcaacctgactaatgaattattagatatcgatcttgctgatcaaaagatgagctgggaagacattcaagcggctttgaaagcctaccaagaaaagcgaaaatattttgttttaaaaaatggaatgctagctaaggcagaacaaccgacaattgaacaattggcacaaactttgcatgatttaggtattagttttaaggatttcattcacggtaaattacatttaccagcatatcgtgccttttattttgctaagcaaatgaaagctgctaatgcactgcatttctcaactaatgaatcctttaatactctgattaatgatttagctaagaatcagttgaagcaaaatcaaataccagttagtttgcaaaatattttgcgtccatatcagaagataggttttaattggctaagcactatcgttaattataaatttggcgggctacttgctgatgagatgggattaggtaaaaccttgcagattattagtcttcttttagctcgcaaagaaaaaatgcaaaatcagttacctagcttaatcgttgcgcctgcttctgttatctataattggcaggcagaagttaaaaagttcgcacctagccttaatgtggctctattagatggcactaaaaaagaacgagagagattgcttttagatgctaaaaagtataatctgctaatcagttcatatcaatcgcttaatcgagatctagaagcgtaccaaaatctaatttttgatgtagaagtaattgatgaagcacaaaatattaagaatcagcaatcagttaccgccaagacagtcaaagtcattaaagcgcatcataaactggctctaacaggaacaccgattgaaaataaattgagcgagttatggagtatttttgattacttaatgccaggttttttaggtttatatcctgactttaggaaaaagtatgaattaccgattgttaaagagcaagataaagaagcagaagatcaattagctaatatgataataccctttatcttgcggcgtctaaaaaaagatgtgctacgtgacttacctgacaaagatgaagaaattgtgcctgttaaaatgaataagaaacaagctgatttgtataatatgcagacgcaaaagattatcgctcaattaaatggacagggggatgaagactttaagagatcacgttttcaaattttggctcagattactaaattacgtgaaatttgttgtgatcctcatttgctttatgaaaactatcacggcaagtctaataaattaattgctacaattgagttgattaagaataatctagcaaatggacataaaattttattgttttcacagttcacagctatgctagatattttgcatgaaaaccttgccagattaagactacctttatttactattactggatcaacacctaaaactaagcgtcaagaacaagttcaaaagtttaatcaaatggctcaaccaggggtctttttgatttcattaaaagcaggcggaacaggcattaacttgactggtgctgatgttgtaattcattatgatccttggtggaacttggctgcagaaaaacaggcgacggatcgagctcatagaattggtcaaaagcattctgttaagatttataagatggttacagaagacagtattgaagagagaatcattgctttacagcaaaagaaagcagaattagctgatataattttgcaaaatgatcagattgctgatgcaacaatgagtaaagacgatttaattaagattttgaaataaatagatcattataataaaataaaaatatttgtttgtacttgcgaactattgtttgcaaaagtataatatttaggtaaacaaaaaccaacaagctaaatgcttgctggttttataattttagtttgagttagtatgtttctttttataccaatacactagaccgaatggaaccagattctcttggtgatgttcgattcgaataatattgcttcggtgactccagtaaattaagattacgagcaatccactgataatgctcaaggcaagatcgtggaaaaagaatgaagcaataaagattagaactactgagatcaaactagttaatgaaaccatacttgtaataaataagatagggaagaagattaacgcacagatcaagaaaaaatggacattatatcctagtaaaaatccagcggaagttgctactgccttgcctcctttgaactttaaaaagacaggaaaagcgtggcctaaaattgcagctaagccaaaaatcaagcaaagataatgtggtcctagtttaaaaattattggtaatactgtagcaaaagttcctttgagaaaatctactataaagacaatgattccagcagctggtcctaatactctaaaggtattagtcgttccgatatttccagatccgtatttcctaatatctttatgaaaaaagatattacccactaacacacctgttgggaatgatccaatcaagtatgctaaaataaacaacgatgcaaattttaatgcaaacatatttaacaacactcctattaatctatcgctattttagcaaagattatcttttaaatatatggtgctggttaaattaatgaacaagtggaggaattttagtggcaaaagctaatacttatgatgattcttcaattcaaattttacatggcctagaagccgttcgtaaaagacctggtatgtatattggttcaactgatattcatggtcttaatcaattagtgtatgaaatcgtcgataactctgtcgacgaagccatggctggttttggtaaagaaattgatgtaatcattcattcagataatagtgttactgtaagagactttgggcgtggtatgccgacaggaatgcacaaatcgggtaagcccacaattgaagttattttaactgtattacatgctggtggtaagtttactgaacaaaattataaaacttcaggcgggttgcatggcgtaggttcatccgttgttaatgcactttcaagttatatgaaggttagagtcgttcgcgatggtaaagcttatgaagaagaatttaaagatggtgggcatccggtaggtacattaaagtgtgtaggaaagacaaaagagccaacagggactaccattacgtttaagccagatgagactatcttttcaaccacgaagtataagtatgagacaattcaggagagaattcgtgaatatgcttttctacttaaaggggttaaatttttcttaacagatgagcgtgagccagaacatcatgatgtttttcagtatgatgatggaattaaatcatttgttaagtatttaaacgaaggtaaaggcacaattagtgatgtcttttattttgaaggcaagcaagatggcatggaaattgaattttcaggtcaatatagtgatggatattcagaaaatttagtttcatttgttaacaatgttagaactggtgatggtggtacccatgagtcaggtgctcgtagtggatttacacgtgcatttaacgattatgctaaaaagcagggtctactaggtaaaaaagataaaaatattgatggttctgattatcgtgaagggcttagcgcggttttatctgttaaaatccctgaagaattacttgaatttgaaggacagactaagggtaaattaggtactccacaagcacgttctgctgtagattcacttgtttatgagaaaatgtcttactatttaatggaaaatggtgagctggctcaggaactagttaagaaggctcaaagggctagggatgcacgtgaagctgctaaaaaggcacgtgatgaaagcaggaatggtaaaaagagacgaaaaaaagaagttttgtctggtaaattaacgccagctcaatcgcgaaatcctaaaaagaatgaactattcttggtcgaaggtgattcagctggtggatctgctaagcaaggtagagacagaagatttcaagcaattttgcctcttcgtggtaaagtattaaatactcaaaaggcaaaattgcaggatatctttaaaaacgaagaaattaataccatgatttataccattggtgctggtgtaggaaccgagtttaatgttgatgactctaattatgataaagtcattatcatgactgacgccgacgatgatggtgctcacattcagatcttgctattaacattcttttatcgttatatgcggccgatgattgaacacggaaaagtttatattgctctgccaccgctttatcgcttacaaaaaggtcgaggcaaaaagacgcaagttcaatatgcatggactgatgaagaactagctgatgatgaaaagaaaatgggacgtggctattcgctgcagcgattcaaaggtttaggtgaaatgaacgcggaacagctatgggctactactatggatcctcaatcgagaatgttaatcagagttaaaattgacgatgctgctcttgctgagagacgagttactaccttaatgggtgataaagtagccgcaagaagaaagtggattgaagaaaatgttaaattcagaatgggcgaagacggctcaattctagaatccgaagatgaataaaagaaggttttaaatttaatggccacaaaagaacgaattcgagaaatgccacttgaacaagtaatgggtgaacgttttggacgatattcaaaatatattattcaagaacgtgctttgcctgatattcgagatggcttaaagccagttcagcggcgtatcctttatgcaatgtatcaagatagtaatacttatgataaaccatttaaaaaggctgctaaggctgtcggtaatatcatgggtaactttcaccctcacggtgacagctcaatctatggggctttagtgcacttatcacaagactggaagatgcgcgaaccgttagttgaaatgcatggtaacaatggttcaatggatggtgatggcccagcagctatgcgttatacggaatcccgcttaagcaaaatctctaatatgcttttgcaagatattgataagcaaaccgtaaacatggtgcttaactttgacgatactgagtatgaacctacagtcttacctgcacgctttcctaacttattagttaatggatcaactgggatctcatctggttacgctacagagattccaccacataacttaggtgaagtgattgatgcaacaatttatttattgaaacatcctgatgcttctcttgaagatttgatgaaatatgtaaaaggccctgactttccaactggtgctattgttatggggactaagggaattaaggaagcatataagacaggacgtggtagaattcaagtccgtgccaaaaccactattcaagaaattcgtgggcataggcaagaaattgttgctacggaaattccattcgatgttaacaaagcactattagtaaaaaagatagatgaaatccgtctgaataaagaaattgatggaatcgcagaagttcgtgatgaaactgaccgccatggtttgtcaattgtgattgaattgaaaaaagatgctgatgcgcagaatattttaaattatttatttaaaaatactgacttacaagtatcttataacttcaacatggtcgctattgatcacatgactcctgttcaagttgggctaaaacgaattttagcttcttatttagaacatgaagaagacgttgtaactaaacgtacgaaatttgacttagataaggcagaagctagattagagattattcagggcttgattcatgccatggatattttggatcaagtaattaaaaccatccgcgcttctaaaaataaagccgatgctaagaagaatttaatagctaagtataataaatttactgaaaaacaagctgaagcaattgtttctttacaactttatcgtttaactaatacggatgttaatgaattaattgctgaacaagacaagttaaataaattggccgaaaaataccgtaaattattatcagatcgtgcaactttagaaaaagaaattattaaagagttaaatgcagtcaagaaagaatttgctaatccacgtcgaactcaaatttcagaagaaagtgctaaagttgaaattgatgaaaaagccttagttgctgatgaacaggttagagtactaattagtcgagatggctatttaaagcgttcatctttacgttcatatcagtcaactaatgatgatgacaatggtttaccagatggtgacaaagtagtttatgaaaacacactatctaccctgactaacttgtatttatttaccaataaggggaatgtcatttatcgtccagtacatgaactaattgaaaccaaatggaaagaaacaggacaacacctatcacaagaaattggattagacagtgatgagcaaattattcgcgtctttgtatttgataaattgaatactgattgcaactttattctggctactaatgacggttatatcaaacaattggagttagctaacttacagccgacgagaacttataagtcacgtgcaatgacagctatcaagttaaagggcaaggatagttatgtagttggggtagatttgatcaaatcagataatcataaggaaatcacattatttactcatcgcgcctatgcaattagatatgatgttagcgagataccaacttcaggagctaaagcagtaggtgttaaatctgctaacttgaaagatgacgattatatcgtaaattatgtcctagttgattctaagtatgttgatttaatgcatgttgggctaattactcaacgtggggcatttaagcaattcaaacttaaactagttaataaagtttctagagccaagcgaggggtactagtactgcgggaattgaagaataaaccgcatagaattgttgctctaatgccatatgctcaagatcatttgttacatgtcactacttctagtgaccgtcatgtaaatattaaaactacggattatccattaggcgatcgttattctaacggctcatttgttattgatactactgttgatgggacgcctgtaagtattgaattgggaagacccattagtagtcaaaattaagatttgagtttaactaaaacaatatattaatctttaaaaacagtgttaagacatatgttttgacactgttttgttttggatagataatagcagtgttatgggacatggcttatcgtaaaataatattttaggaaagagataatcgttatgtctaaaagtgatactattttatcggctaaatcattgcgttattttttacaattgattgagacgatgaattatacccaagctgcacaaattttaggtattacccaaccggctttaactcagcaagtaaaaaaattggaacgcgctattggtgctccattatttggacaaatggggaagaagttatacctaaccgaagctggtaaagaaatggaagcagcagcgatagagttgctaaataccattaatggtgttattagtgacattcaagaatatacccagtcagataaaggcaatatttcaattggtattctagagtccgtacatgttgatcttttctaccaatttttacgttacttcaataaaaagtatccagaagtaacttttactgttgattactttgaccgcaaagagctatggcacagacttgattccaatatgattgatatggcgattatgtatatgccagatactactaataaaacaggagctaatttccgtcatcaatacaatcatcgtgatatttgccctgagcatattgttgtactgactcacaaggataatgtggaagcaggagggacatattctgttactcgttttggcaacagaaagtgggttgcatatccggagaattactacttatcaagattaatgcgacttaactttagtaaaaagattgatctcgttactccgtttaaaattgcatctactaaggaaatgatcaaaattgcagaaaatactgatcttgatacttatgtagatcagacttactatgaggcgcataaggatgagattaatttgactcctgtttatattaaaaatatgcctgagtttacgactgcttgtgtttatcgtagaggaaaattagatgttcctaggatgaagaaattactaacggaattacagattttcttagacaataacttggataggaaccataattttagtaaactattaagtgaagaaattaaataaaataattagaaaaagaggcaatttatttaatggaaaaagaatttgtttttggacaccaaaatccagatactgatgcaattggcactgctattgcattttcatatttgcaaaacaagttaggttacaacactgaagccgttgccttgggtgagcctaatgatgaaactgcatatgctcttaaaaaattcggctttaaagcgcctcgtgtaattaaagaagctgctccagaagttaaatctgttatgttggttgaccacaatgaaccacaacaaagtgtttcagatattgacaaagttaaggttactcatgttgtggatcaccatagaataatgaattttaataccgctgatccattatattaccgtgcagaacctgtaggctgtacttcaaccattgtttggagaatgttcaatgaatttggcattgaaattccagaaaactacgctggtttaatgctttcagctattatttcagatactttacttcttaaatcaccaactactacagataaggataaaaaggctgtagaagcattggctaagattgctggcgtagattacaaggaatacggcttagcaatgcttaaggctggtactaacatcagtgacaagtcagaagaagaattgattgatttagatgccaagagctttgaattaaatggtcacaacgtccgtgttgcacaaatcaatgttgttgacttacctgaagcgttagaacgtaaggaagcctttttaaaggcaatggatgcttcatctaaggataatggctatgatatgtttatgcttttaattactaacattcttgactcagattcagaagctttagttgttggctctgatgagactaagtcattattcgaaaaagcatttaataagcaacttagtgattcagaagttgaattacctggtgtagtatcacgtaagaagcaggttgttccacctcttactgatgcttttaatgcttaaaagtaatgatgtaaaaaataggaggtagggttaaccgcctcttattttttacctaaaaattaaaactgattttaggagaaaaatattgaaatacccacaattaaatttagaaaatcaacagggaccaacagctgtattgaaaaccaatcaaggtgaaataaaaattcaactttttccagaacaagccccaatgacggttgaaaattttattcgtttagctcaaaaaggctattatgatggtactatttttcaccgcgtaattagcgattttatgattcaaggtggagatcctgaaggaaatgtcactggtggtgaaagcatttgggggcatccatttgaagatgaactttcacgagaactttttaatattcgcggagcattatcgatggctaattcaggccctaacactaatggtagtcaattttttatcgttcaaaacaagaatatgcctaagcgttacataaaacagatggaacccgcaggctatccaaaggaaattattcatgcttataagcaaggcggaactccatggcttgacggtcgtcatacggtctttggacaagtaattacaggcatggatgtagttgataaaattgctaagtcgaaaaaagataaaatggataaaccactagaagatataactattgattcgatccaagtccaaggatcaaagtttgatgactaacaaaaacgtgctgttttttcggaataaacagcacgtttttgttaattattcatttcttttagaagggtgatcaaagacttacatacgcgttcagccttaggttctggtaattttcttaattcgttaataacttttttcatgaaaacgggtgtattgttatcatgaattttttcaggcttgatttttttagcacgataggcattgttaatgatatcgggtgtagtagtattcaaagctttggcaatagaatcaagcttctgaatactaatgttttggtccttagtcctttccacacgtgaaataaaatttacagaaagatcacttagctcagccaaatcttcctgtgttagtttctgttcacgtcttctacgagaaatttcttctcctaaattaatattcacaagcattcgatcctttcaagtaacttatagtctattatagcctatataaaattatgtaaaaaatgaatagactattttaatattctcaacatacacttatattaaataataagaaattatatttgtttataaatgtacatttttagcgtaatcagtgctattaggcactacagtttagaaactgtcaaatcttttgtgtaaatagttctttctcgtaaattgattttttaattatttatttaatcaaagtaggattctaaggtgtcctgaacctgaccaaagcctttatgaattcgattgaaataacggtcattgtagctcattgcctgaatgccaataaaagcatcaagcgactgttcagttggaaactctgccttaggcttagctttgcgcttgatcacattgttaaatgattcaatcatgttagtcgaataaattgaagctctgatctgcttgggatagttataaaagaccagcagatctggttctatgtctttcaagcttctgataacatggctgtaaaccttgccccatttggtatagaagtcatgcaggacagctgtggcttcttctttgtttgtctgttgatgcacctgtttgaattcgttcatgatcttttcacgatcgtcgacgcgtactttagcgcagatattgcgcatgacatgaaccaaacagcgttgaaaatgagctttaggataagtcctggccaaggctgttttcatgccaacaacaccatcagaaagaaaaagctcaacttgctttaagcctcgggatttcatgttttgaagcatatctgtccagacttcaatgttctcgctaggtgcaatgcagtagtcaatgacctccttgtgcccattaggcttgatgccaatggcaatatagactgcttcacgctcaaatgtttctcggcgcaaaggaaggtatgtcgcatccaaatagacgcagaaaaacttgtcgcttagcttgcgtttgtggtaagcctcaacctttggaatcatctgcttggaaatatttgatacctgagctggactgtaatggctgccatacatcttttcaattagatcggctatttccctggtggtcacgcccttggagtaaagcttgataatcatgctttccaagatatccgagtgctgcttgtagtcaggcagcgtgtgctgatgaaattgaccgttgcgatcccggggcacttgcacttcaattgggccaaattgcgtatcaactttgcggaaataagcaccatttctagagttgccagtattccagccatttctggcatagggatcatagcccagaaaggcggtcaattcagcttctaacaagttattaacagcctgttgtagctctttgcgcaataaatcatttattttgtctggattgaatagagcttgagcaaaatctttggtaaaatcattcatgaaggagttcttctttctgtatgtgtttttttgttcaaaccaatcatacgagaaaggaactcctttttctaatgtttaaagaaataaatttaaggaatcattcatccttacacaaactattttacagtctcacagtttatagtatagtcttaaattgaatacttttattgttaaaatagaaatgaaataaaagctaaaaaaatatactaattattaagtttttaagcttataatgtatacaaggatataaaaatagattggggatttgatgagtttaaaagaggttttaaatagtaatcggcctgcagagtcacgacaattagcgtgtgcgttaactttttgtgggggatttattgatgcatatacatatatccagagaggacatacgctttccgctggacaaacaggaaacgttatcttttttagttcagcattagctgatcataatgttcctggaatgattaatcgagctagtacgtttattgctttttctttaggattgctattagtaggactttttcataaatatgtgaaaagtcactattggagagtattttgcttatttccaattttagcgatttgtattgtagtgggctttttgcctaaaagtgttcctaattattatattgtgcctgctattgcgtttggattggctattcaaaacgcatctttcagcaaaattgaaggcatgggttataacaatgcatttacaactggaaatttaaaaaaatcggttgttgcatggagtgcattttttttggtgaagacaaaagtaaacatacagctgccgttaattatatgatgttaacaattgcatttgcagttggagcaataatttcagctttactgcaaaaattattggtattaaaaactatttggattgcagtcatttttttaacgacgattaatttagtttatatcattgcattgagacgaaataaaaaaattgatttttcaaaatgattttaaaagcacttgtcataattggcaagtgtttttttgaagaggttgtgagtgagaagaaagcgaccaatctgaaaaataataattttataagtgtgcgtataattaatattatgtaaagccagattgaaaaacaatcaatttaataatagaagtcataattaatttaattgtttcagcaaataagtcttattttggatttgttaactcgaattcagagactgtaaaatattttgtgtaaggatgaatgattccttaaatttatttctttaaacattagaaaaaggagttcctttctcgtatgattggtttgaacaaaaaaacacatacagaaagaagaactccttcatgaatgattttaccaaagattttgctcaagctctattcaatccagacaaaataaatgatttattgcgcaaagagctacaacaggctgttaataacttgttagaagctgaattgactgcctttctgggctatgatccctatgccagaaatggctggaatactggcaactctagaaatggtgcttatttccgcaaagttgatacgcaatttggcccaattgaagtgcaagtgcctcgggatcgcaacggtcaatttcatcagcacacgctgcctgactacaagcagcactcggatatcttggaaagcatgattatcaagctttactccaagggcgtgaccaccagggaaatagccgatctaattgaaaagatgtatggcagccattacagtccagctcaggtatcaaatatttccaagcagatgattccaaaggttgaggcttaccacaaacgcaagctaagcgacaagtttttctgcgtctatttggatgcgacataccttcctttgcgccgagaaacatttgagcgtgaagcagtctatattgccattggcatcaagcctaatgggcacaaggaggtcattgactactgcattgcgcctagcgagaacattgaagtctggacagatatgcttcaaaacatgaaatcccgaggcttaaagcaagttgagctttttctttctgatggtgttgttggcatgaaaacagccttggccaggacttatcctaaagctcattttcaacgctgtttggttcatgtcatgcgcaatatctgcgctaaagtacgcgtcgacgatcgtgaaaagatcatgaacgaattcaaacaggtgcatcaacagacaaacaaagaagaagccacagctgtcctgcatgacttctataccaaatggggcaaggtttacagccatgttatcagaagcttgaaagacatagaaccagatctgctggtcttttataactatcccaagcagatcagagcttcaatttattcgactaacatgattgaatcatttaacaatgtgatcaagcgcaaagctaagcctaaggcagagtttccaactgaacagtcgcttgatgcttttattggcattcaggcaatgagctacaatgaccgttatttcaatcgaattcataaaggctttggtcaggttcaggacaccttagaatcctactttgattaaataaataattaaaaaatcaatttacgagaaagaactatttacacaaaagatttgacagtttcctgaattgaataatatgctgacaataatcaataaaacaaccttcaaagagaagtattttgaaacaattatggtaaagtaattctaattaaaaacaatgaaaatagttgagtaatatttgctagttttgcctttagtatctataaagccattttttatttttatgctatagctttctttaaaacaaaaattttaatgatcgctagataaacctatctcgcaaaagcctaattttggtaaatttgtgcttttgttatttttattgttttaacgttttgtatttcattttaaattcgtaaaaaaatattttataaattctttgctctttttgctacatacaaatcggtattaagtgcttttatatttattcttattccctatttttaagatttgctgcaataatacacatattgaaatttcttaaataaataatcaagcggtaaaaatgataattctactaaactcatgactcaagtcgctacttaaatctgtgtttttacatgaataagacatctaaataaagtttcaatcttcaaaaaatgctgagaatcactctaagatttctttttaatgaattaatttatcgtggttactcaatctttatacaaacaagcaacattttaattcattattatacctctatctcccctcctctgctgaccagggaagacgaaaaaagagccgaaatcagacataattcgtccaatcaggctctttgcttatctagctagaataaaaatctgaataaactcaatctgttgcaggtctaattttattcataatgaaggcaacgacgattaccaagataactgcacctaaaattgacggtacaattgccatgtccgcaaccttcggtccccattcccctaaaagggcttggcctagtgaagatccaaccaatcctgctaaaatattagcaatccagttcattgacttaccatgtccagttaaagcacctgcaattaagccgattactccaccaacaattaatacccaaatccaatgtagcattttgatcacatttgctttcttgcaaaatatcttatcacatttctgattaaacaaagcgctttctttaactatctttattttgagactgtaaaatagtttgtgtaaggatgaatgattccttaaatttatttctttaaacattagaaaaaggagttcctttctcgtatgattggtttgaacaaaaaacacatacagaaagaagaactccttcatgaatgattttaccaaagattttgctcaagctctattcaatccagacaaaataaatgatttattgcgcaaagagctacaacaggctgttaataacttgttagaagctgaattgactgcctttctgggctatgatccctatgccagaaatggctggaatactggcaactctagaaatggtgcttatttccgcaaagttgatacgcaatttggcccaattgaagtgcaagtgcctcgggatcgcaacggtcaatttcatcagcacacgctgcctgactacaagcagcactctgatgttttggaaagcacgattatcaagctatactccaaaggcgtaactaccagagaaatcgctgacttgattgagaaaatgtatggcagtcattatagtccagctcaagtatcaaatatttccaagcagatgctccccaagattgaggcttatcacaagcgcaagctaagcgacaagtttttctgcgtctatttggatgcgacataccttcctttgcgccgagaaacatttgagcgtgaagcagtctatattgccattggcatcaagcctaatgggcacaaggaggtcattgactactgcattgcacctagcgagaacattgaagtctggacagatatgcttcaaaacatgaaatcccgaggcttaaagcaagttgagctttttctttctgatggtgttgttggcatgaaaacagccttggccaggacttatcctaaagctcattttcaacgctgtttggttcatgtcatgcgcaatatctgcgctaaagtacgcgtcgacgatcgtgaaaagatcatgaacgaattcaaacaggtgcatcaacagacaaacaaagaagaagccacagctgtcctgcatgacttctataccaaatggggcaaggtttacagccatgttatcagaagcttgaaagacatagaaccagatctgctggtcttttataactatcccaagcagatcagagcttcaatttattcgactaacatgattgaatcatttaacaatgtgatcaagcgcaaagctaagcctaaggcagagtttccaactgaacagtcgcttgatgcttttattggcattcaggcaatgagctacaatgaccgttatttcaatcgaattcataaaggctttggtcaggttcaggacaccttagaatcctactttgattaaataaataattaaaaaatcaatttacgagaaagatctatttacacaaaagatttgacagtttctttattttaagcgaatgaactatttcttgtcacttttaaaatatattatttgactgtcttatacttttctttagatttggggcatatttcttgccacgactaattctttattttttgtctattgtatatctcaatttgatttcaatttttttcggtttgattactgatatattaataaatgatctcatctattgccttttgagaactatatctgtagtctataaagtataaattatgtgagagatatagataagattctctccactaagtatggaggacataaattgtttaaaaggaaatcaattattaaattagcatgtgcaactatgttaacgaatgcaggtgtcacacttttatctcaaatgactcgtttctctgactcagagagcattgtgcaagcttcatcaacatcagttgttgctaaagcccttggaattgatgttgccagctaccaaagcgcagatttaactgctcatgccaaggctggttctcaatttgcaatcgttaaagttagtgagggaaccagttatcgcaaccctaaggcagccaatcagattaaatctgctattgctaatgatatgatgccgatggcttatcattttgcaacttttagttcaagttcatcggccgctaagcgcgaagcgcaatacgcaatttcttctgctaaggcgttgggattaccagctggctcatacttagcctgcgattatgaaactggtcagggcaatatcattactaatggtaaaaatgtgacagctaaggctattattgcctttatggatcaaattaaggcggctggctatcaaccacttctctatgctagttcttccgttttgcaaaacaatattaatactccatctatcgtgaacaagtatcctaattcactctgggtagccgcatatgcgatttcaggccgagtagaccaacccaactttaaatacttcccttcaatggatggtgtcgcaatctggcagttcacagataattggcgcggaatgaatactgatggcaatattacagtcttgccattatcaatcgcaggtaacgcggcagtttcacaggctcctaaggcttccaataccaagaaaacagctacagttatgtacaagtcatatgtttatgacaaaaatagcaaccggacaaatgatttttataatgcttacagctctattgcttattatgacaataaggtgagaattaaaggcaaatcaatgattcgtgtcggtgaagacaagtatgtgatggcaagtaacgtactaggcaattcacgcgtctttaaagctgatgctaaagtgtataaaaatgatggcaccattaatacaaaatggtctactaaaaaatccggttcaccgatcaagacttatggccctaaacattacatcaataatgaagcttactatcgaattggtaaaaatgcttacgtcaaagcagacaagttctaatttatttttagcagcaaatatttgctgcttttttgatgcatccctaaaacgtaaatgaactgacaaatcatttccaatttatttatctgcatcccttttttatccatgttaaaattaaggcattatatagaaacgaggataagataaggatgaaatttaaaaagaagttagctttattcttaggtctgggagtattattgctttctctgactggttgtagtgattttcaaaactgggaattatctatgcgctctaagattggggcattgcccttaacagtatcaacgtatgattctaatggacaaaagatcgaccagatcaaagctaagtcagttaatattcatactgataaaaagatgtcacagaaaagtagtaatggcactgaacattctagcgtaattgatgttgactatggcaataatcgaatgattcacgttggttctactatgattgcctatgaaggactgaaaaactacgaggatgcatttaacaaaaaagttaagatcgacgatcaaaatcgttctgttcctctgttaaatacaatgtatcagaattttaaaaacgattggaatggtagctcaagagtagtaatgattagaagccaattaggaatgccgattgctgtctttattggaaatcacgtctcaattcataagagtgatatgaagaatgcaactcaatttgtgattgatggtcatcgtctatttgtttaccgtgctgattacacagtttatccaatgtccagtttaaaaagcaattaactataaaaagtgtcaatcctcattttaaggactgacactttttattatttatcatcaattaatgcattaaatgcttcattagtttcaacgatgtcgctcattacttgattaatccagtcattaagcttatcgttatcgtagttttctaaaccgccttcggaatctccaatgtccgcaataccattattgaaatctactagttcagtaattaacttttgagcaaaaatcttagtggtaccaccaaagtttttcgcaaaattatttacatccccatatgcatcggcaatatcactgaaaactgtgacagttttaccaaaagtctcactcaagttatctacatctgcttgagttggtacagtcaattcttcatcttcattattaagttgttcatctaaacgaacgccaatgtcgtttaacactaagtgaccatcatatagacgattcagtaatttgataccactagggtttttagcttggaagtttacactaatttcttctgtcatactttttcctcatctcacataatgtattttcatctattgtacaatttttagccaaaaaatacgactaaacaaggaaaataagcttttttcgattctttataaaaaatgttatattttacttgaacattagcaataaagagcataaaataaacgattgaaaagtgttgtaccatacaaacaacatatgtttgtaagtaatgtttgaattactaaatgtaatttgcccttacttactgacgagcaatcactgttgctataattagaatgctaagagttttctataagcgttgctggtattctagttatagtgacatgattatctaagttaaatttagttgcaatcatttttctacgttagtactatagatattcacgttcgaatgagcgcagtaattttaaattagactgttttttatcacctattcctgagaataggtgatttttttatgattaacgtatttgtatgatataatataaacattagttcgcaaaaggagtagatatggaaactgctaaatacctagaattgatccaaattgaagtaaataaattgcctgattttgttaagcaatttaatcttggtactaatcattcattaactactacttaccagtacttaactgaaattcgacgcttcttcgattggctacgtcaagaaaatatctcttctgcttcagataatgctcatgttactacggatacattagccaacttacgtcgcaatgacataatgctgtatattgattatttaggacatacccgtaataagcaaggccgactaaactcccccactacgattaatcgctcaattaatgctttacgctccctatttaagtttttaaccattactgccgacaataatcatggtgagccatattttgaacggaatgtaatgcttaaaattaattctttaaatgatacgcaaacacttaattatcgggctcatgtacttgaaagccacatgtacactggtaagttaaaatttgaatttttgacttttattgatcaggactatattaaccattgtaataagcaagcaaagattggttttaagcaaaacaaagaacgtgacatggcaattgctgcattaatcttaggtaccggcattcgggtgtctgaatgtgctggcgttgatttgagtgatttaaaccttaaggatgctgtactagatgtaactagaaaaggcggacaaaaagatagtgtaccaattgcagaatggacacttccttatatcaagcgatataaaggtattcgtaatgaacgctatcatgcagatagtaagcaagtggcattctttttaactcaatggcatggtcaaacgcggcgaattacaactaatgcaattgaaaaaatgatcaataagtattctgcagcttttggtcatccccttaccccacataagttacgtcatacggttgcttctgagctctatgaagtaactaaagatcaagtgcttgtagcacaacagctaggtcaaaaaggcacttcagccaccgatctatatactcatgttgatcagaaaaaacagcgtgcggctctcaatgagatctcaaaaaaaaatcacgattaatcaaattaaatgcaaaaacgagtttggctattcaattccaaactcgttttttattaatgtttcaatttcttgtaagcttttttggagccacgatctagatcacgattaaacttataatcttgccagtctttaacaaagagtaaatctaagttatatccttttgggtacaagtctttagctagtcgtcttaattgtaaacgtctgagtggtacttctacaaattcttttgtcacaaatatctttgctgcattttgggtaggaagatatttataaaagattccttcttcttttaaattggtagcatatacaatatcacctttatgaaattcttttttaacaaccaggttgcttttgtttttccgctggtgaacgaaacgtttttttaaagataaaggtaaattattgcccgctaatatggcttctgcttgatgcaaaacattttctggaatacctgattttttggcgatccatagtgctcgactattaccaatacttcctatctttaacttataagtaggttgcagattttttaagtcaaaatccattgcagctgtgataaaaccatcatgctgcttagcaaaatccttaatagagctgtagtgtgttgtggccatgattaaacagccacgtaaatacaactcttgtagaataccaatagcgagtgcgcttccttcatttggatctgtccctgtccctaattcatctaataatactaaactatggaattgagcatatttggtaatcatggcaatatctttcatttcggctgaaaaagtactcagagaattatctaggtcctggtgatcacctattaaagtaaaaacgtcatccattaatggaatatcacatggtttatcgcttggtaaaaacagacctagttcggtcattaaaatcatcaagccagtagttttaagcgcgacggttttaccaccagcatttggtcctgtaatcattagaacactattttcttgggttaattctaaggttaacggaacaggattaatgatcaagggatgccgcactgcacgtaaaacaagagaattttcacgattaattttaggcctaatacaattatatttttgtgcaaactttcccctagcaaaaatcatatctagtaaagtgattagttcaatgttacgcttaatatcatccttcacgtcgtatatttttgcagttaaagcacctaagattgctagttctagattacgtatttgtgcctttaaattggttatttgctgatttagacgaacaaccttagcaggttgaaagtagacggtttgtccaccattagaaacagccacaatagtccctgacaattgatttttgtagtttgctttaattggaatggtagcgtagccctctttttcaacgatcattgcgtctctaatcattttttgattaggtttactagtcaaaaaatgatttaatgcagttttgagttcagtaacagatttctttaagtcgcggcacatttttgctagttcacgatctgcctcatcgcgtacttgaccatgttcaatagtagtataaatagcatcttcaatgtctggcaatagcgtcatgtcttggacatatgcattgagtaatggtgctagctgctcatgtctggctaaaaagcgttgtagtaggcgatttactcgtaaaaattctgctactttttctagatcatcaggagttaagattagtcctttttcagctttagtaattaaatgctcgatatcctcagaactggcaaaaggaatgtgctgccgtaatttcaaaatcttcacggcttcttctgtttcattaagcagttgttctactttatgtaaattgctacttggttggacggaacttaattgttctttggcagcaatagtaattgcctgttgagctaagatatctttaacttgagtaaagtttaagttttgattattgttgatatttttcaatttgatgtaatttccttatgtttaatttaacgctgattgtaactaatggcttaataagtatgcttgcagacatatgcatttcctcgaatttctataatttgatttaaaaatgattgtaacataaaaagaacattaaaatatatactatagtaaaacagttattaaattaattcctatattttatgataaccatattactattgcctactatagcaattttgaaactgtcaaatcttttgtgtaaatagttctttctcgtaaattgattttttaattatttatttaatcaaagtaggattctaaggtgtcctgaacctgaccaaagcctttatgaattcgattgaaataacggtcattgtagctcattgcctgaatgccaataaaagcatcaagcgactgttcagttggaaactctgccttaggcttagctttgcgcttgatcacattgttaaatgattcaatcatgttagtcgaataaattgaagctctgatctgcttgggatagttataaaagaccagcagatctggttctatgtctttcaagcttctgataacatggctgtaaaccttgccccatttggtatagaagtcatgcaggacagctgtggcttcttctttgtttgtctgttgatgcacctgtttgaattcgttcatgatcttttcacgatcgtcgacgcgtactttagcgcagatattgcgcatgacatgaaccaaacagcgttgaaaatgagctttaggataagtcctggccaaggctgttttcatgccaacaacaccatcagaaagaaaaagctcaacttgctttaagcctcgggatttcatgttttgaagcatctctgtccagacttcaatgttctcgctaggcgcaatgcagtagtcaatgacctccttgtgcccattaggcttgatgccaatggcaatatagactgcttcacgctcaaatgtttctcggcgcaaaggaaggtatgtcgcatccaaatagacgcagaaaaacttgtcgcttagcttgcgtttgtggtaagcctcaacctttggaatcatctgcttggaaatatttgatacctgagctggactgtaatggctgccatacatcttttcaattagatcggctatttccctggtggtcacgcccttggagtaaagcttgataatcatgctttccaagatatccgagtgctgcttgtagtcaggcagcgtgtgctgatgaaattgaccgttgcgatcccgaggcacttgcacttcaattgggccaaattgcgtatcaactttgcggaaataagcaccatttctagagttgccagtatttcagccatttctggcatagggatcatagcccagaaaggcagtcaattcagcttctaacaagttattaacagcctgttgtagctctttgcgcaataaatcatttattttgtctggattgaatagagcttgagcaaaatctttggtaaaatcattcatgaaggagttcttctttctgtatgtgttttttttgttcaaaccaatcatacgagaaaggaactcctttttctaatgtttaaagaaataaatttaaggaatcattcatccttacacaaactattttacagtctcgcaattttactataacattcagcactagtatctcaactgtaatttttaattacaaatctattatcgtaaaaagggtaaacaaaaaagaccatagtttgtactatggtctatggctatttgttcttattttaattcgagcttatcaatatcaaccatccatgcaattgcaattgatttctctcctaagtgtgtagcgattactggactaaattcagctacatcaactggcttatctggaaagttttcattaacaaattgcttaatttgctccgcttgctttaaatcatttgagtgaaatacaaacaagcggagcttatctttataaggcaaatttgctgtcttctctaaagttaatttttctaccttagaaacagcacgccttaatgatctgatcttatcaaaagcaacgatttttccttcatcattaaaagttaacaaaggcttgatttgaagcattgtcccaataaaagcaccggcattgcttaaacggccaccacgacttaagtttttaagatcatctactacaaagaattcatcaattgtcttacgtatctcatctaacttctttaagatagcctctggttccataccattttttatcattcttgcggcagctaacaccaagtagccttgcaatctaactgtcatcttagaatcgtatggatataaattatattcaggattgttatgtgccatatttaccatattttgataaaagcctgagataccactggacaaagtgatagcgataatagcttcatagccttctccgtgtaatttattacataattctatcatttgccccatgctgggctgtgaagttttaggaaaagcagcaccttgtctctccatctcaaaaagctgggtggaagtgatattaacgccttctgaatattccttatcacctacgatgacaggaataggaactacattaatatcattatttttaacttcttgatcagttaagacactagtactgtcagtaactaatgcaattttcaatttattaacccttcccatatctaatttagcatagaaaaattatagcataaaaggcacctatcacgcaccctattccattttttctagggtcatagaagtatcagcgacttgatttaattgcttaataaataaattagcagcatctctgtcaaaatagacaaataataaattctcaatcttagtcagagttttttttagttctttagctttagtcacgccagcttcacttagattcacaatcttgcttgaatctttttccgatctagtgatattaataaagctcatagtcttcttttgctgcaattgacgacttaaggttgataatgaaatattaagcgcttctgccagcttccccatcgctaatgcttgatttttgttttcatcaaaaaatagcaaaattcgagtttgtgaaatatttaagccacatttgtgatttatttcttttttcacttgatctgcgatcgtactaaaaaataatacatccattcgtatagtcctttttctccaatgtagattactatatacttgtattttatcatttaatatggcatttgataataccaaaaggctaacttatcagcaatattgtataatacaatgcactttttacgttgtaatatacaactgaatgatatagcagacctcgcgtgaaacatttactactgtattgcaggtttcaattatgattagctataacttataaatataatcattttagaatctgactaaaaattgatataatattacacgaactttgaggtgatatttatggcatttgatggattatttatccatagtttattaaaagacttagtccctactctggtaggtggtcgcttatcaaaaatttatcaaccatttgatcaagacctagtcttaatttttagaaaagatagaaagaattatcaatttttaatttcggccaatgcacaatatccaagaatgtatttgactaaacaaaacattgcaaatcctgataaagcacctatttttgtcatggttttaagaaaatacttagaaggttcagttttgcaatcgattgagcaagttggcttaggtcgaattgtcaactttcattttagtaatcgaaatgaacttggtgatcaagtcaagctcatgctttctgtagaattaatgggacgtcatagtaatgtcatcctttataatcaagaagacaatcacattattgatttacttaagcgaattaatcctgatgaaaatagagcgcgtgttttactgccaaaagcaaaatatgagttgcccccactaaaaccaggattaaatgggttgactctatcagaaagtgaatttaaacaattaagtagtgaaaaccagcctaatgaaattgctcaaaaaatggatggcttagataaagatgatcgaactgaattattaggctatcttgaagacgattacacttattcatcttttaagaccttttttaatcagtttgacaatccgcgtgcttttattttaaaaacacctagaaataagcgtaagattttttgttatttgccctatcatttagatttagagaaagaaagctctaatccagatctgaatgctggcttagatgaattttatgaatatcaggcaacacgtgattgggttaagcagcgtgcaggacaagttgaacgtgtagttaagaatgagcaaaataaactaactaagaaagttaaaaaacttgagaagcaattagatcttgctgaaaattcagagggctatagaattaaaggcgaaattttaaatgcaaatttggctcaagtaaaacctggaatgactaaagtttcattacctaactattacgaaaataatgctccattagagattaaattagatcctgctctctcccctgctcgtaatgcgcaaaagtattttactcgttacaaaaagttacgtgattctattaagcacattaatgaacagcttcgtattgctaaggataatattcgttactttgattcaattcaaacagctattgacaatgcggatccacaggatattgatcaaattacagatgaattgattaatcaaggatatttacgtaaacaaaagaaaaataagcgtaggaagaaaatcactgaacgcaatttaaatgaatttaaacttttatctggtaaacacgtattggttggtaaaaacaactatcaaaacgattggcttactcttaaaaaagctaataaatctgattactggtttcatgttaagaatatgccaggctcacatgtgatcttacgcgatgatcagcctactgatcaagatattaaagaagcggctgagattgcagcttacttttctaaggctaaaaattccgctcacgtacaagttgattatgtgcaagacaagcgtgtgaaaaagcctaatggtgctaaaccaggatttgtaatctacactggacaaaattcaattgaagtaactcctgaagaaaaggaaattatgaataaaaaaattgaaaaataaaaatcatcgaactagttagttcaatgattctcataaatgcaaagtcatatcgactttgcattttgttttgcttattaaataggttgagtagttaaagccaatgattctagaacgtctgaaatcaattccgctgtttcgatacttgagaaaacaggaatatgtgtattcagcgcttcatctctgatgcgcgatgcatcttcgctagctgcatcagacaaattagtaatattaacaaccatgacgatcttatgttgacgaattttatctagtagatttctagggtctttatgaaccttctccactactccagtagtaattccagcttccgcaaacatattagctgttccttcggtcgcaattaatttgaaacccaagcgatcaaatcggcgagctagttgggtcacgcgattcttgtcttcatctctgactgaaataaagattgttccataacttggaatatgtaaatcacttgcttcatatcctttgtataaagccttagctagttgagtatctcgacccattacagaacctgaggatttcatatttgaatcgaaagtattaccacttgaataattaagaaatgaaaatactggcattttaatatgaataaaatcgctgttttgccatagaccattaggatatcctagctctgctaaatttttgccaattaaagcttctgtagcacaagtagtgatatccttatctagtgattttgataaaaatgctacattatgacctgcatatggtttaatttgcaatagatataggtcattatcaacgaataaatagtgcagattaaaaataccttttgttttcagctgcttaattaatttaattgactcttgctcaatctttttttgctgctcttcggttaaattttgcggctgaatcactgcaattgaatcagaggcatgcgaacctgtttgctctagatgttcaattataccgggcaaagttacattggtaccatcagagatagccgttacctcatatttgtgtccctcaataaagcgagaaatagttatttgatcaagttgattttctgctaaatatttctctattgcaggaacatcataaacaactgcagatttttgcttgttttctttattcataccaccaattaaaagtggaaaaccatatttagaagcaaaagcgaaaacctggtctgtatcagttgttttatttaatgccgggacccgctttaaggtagtaaattgttgatcaagcaaagtagtaatcttatcccgcggatcgtcgtttgccttttgcccaataacgtgcaaaccacatttttccaactctttactcaatgcactgattcttttgccagaaaattgaactaatacatcagaaatattttctcttttagcaacagttagaatattttcaactgtaatggaatcaaaataaactcggtcaatattcttataccttgatgaaatcgattcgtcattatttgatagaagcacagtaacatagccatacttatgtaaagtatcggccgcgtgagcaatcatatagtcaaactcgctagtaaccgaaacttgaagcggcaacatgcccaaaatcaagatctttttttcagcatttaaagcttgtgcttcattttgaacatcatatgcactgtagtaagcacaaacattaggtttatatacacctgctgagccgtcgatcttcaaatatgatggctgcaagtcaattttattaatcaaagagcgaacttcagtaactgatttttgtaaaatcttagctaataatgggttaaagaatccatagtctttagcttcttgcagcaaatcacgcgaaggctgctccttctcttgtaataactttttgccaagtcttacaatgtgaagcaatttctgataataaaccggatgcaaatgtgttactttttgtaattcagaatatggaatatcttgatcaattgcggctaataatttaactaaatgcaattcatcaggatgtgccaaatcattcaaaatatctgcagtggatttttctttttcttttataaaagcatgccaacccaattctaaattaatagttgcatctaagcctttcagaaaagcagtttcaaaattacgccctacacccattgcttctccacttgcttgcatgcgacttcctagcaaatagtggttataaccggattcagcaaatgaccaatatggcattttaattgctactgcatctaaggtgggttcaattgaggcattaagtccagatagaggatcggtaatctcattcagtcgataaccgatagcaactttgctaacgacatatcccacatcatacattccaattctttgagcccaaacagaacttcgcgtcaaacgcggacgaatcgtcaaaagcttagatcgaatttgagttccatggtgtttaatcgcaaaatgaaaactagcaaatccaatgagatcaagattagacatgatttttctaacggttattcttaactcttgaatatgatcattgtttagggttaatgatggcatcacaactgcagagtcacctgaattaatacctacagcttcaatagatcccgcaaaattgataaaagctaaattgccatccttatcacggattacgtcaacaattacttcttcccaactagataagtcttcagttaagcgataattcttccatgtaaaattatcattttgcttttcttctttaaagtaactgattaaatcggtaggatttgcaaattgcaaatgttcgttgtgtacaaaacggttgtacttagtaactaatacgggaaaagtgactttgtcgttaatgctttctagcgcattatctaaattatcctgaatactctgattaagttcccaagattgcccggtatcaatatgtagcttagtaagcaactctgtctttttctgttgattccccatttgtagagcacgcgaattcaatgttagtaactgaattcccatttgttctaaaatgccatcttgtaataacttatgtgcaacctttaaaccattagttgaaccataagctgtcataattgcatctggctcttccatccgtagaattcttttcaggaagtcgagagtcatcggttcaagatagactgttacaccaggttttttatcagttgaaattgtagctggattaggattgactagcacaacttgaatgccttcttctgtcaaagcatcaattgcttctgttgccataagatccatttctgctacactaccgattaaagtagggcctgatccgataattaaaactttatctaaatcgttttctaatggcatataactaccccatcatctgtaaaaaataatcaaaaatttcatctgcatcattagtgcctggtgctccttcaggattaaaagcagtggcgatcaatttgtccttactgttccagaagcccgccatcagttcactgtgtagatcaaagtattcacgattcatattcatctttacactatcaggcaacactagttggtcaatattcatcgctgtttgccagatagcattaccattttgttcaatcactggataattaataccatcaaattcttgtggtaattgaaccagttcaaagccgagataatcgctcaaagttaaaaaacctaatccgattcctaaaattggatacttaccataaaaatgatctaaaactggcgttagctgattaattacttcttctggttttcctggcccatttgaaataattattccttcaggacgtaagttttcaatatcaatcggactggcactgtatggtaaaactgtcgtatttacttttcgtaaagataaagcacgcagcattgagtgctttagcccaagatctagcacagctacagttcgtccaacattaggggatgcatatgcattcttagttgaaacagtcgcagatttatttttaggtaaaactagtgctttaatctgatcaaaggcatgctcgtcattagtatccatgatcgaagccttaattgtaccttcttccattagacgatgaactaaagcacgagtgtcaactttgaaaattgcagggatgttcttttctttcaaaaaagaacttaaatcttcaaaattttcactatctgaaatatttaatgcaatatcgttagcaataatccctttaactacgggatcaatactttcataatcaatggcattaataccgttattaccaatcattggtgaagtaaagactaaaattttaccagcattagtaggatctgttaatgcttcttggtagccaaaattagccgtttgaattgctaattcaccggttgaaataatactggcaccaattccttcacctggaaatgaactgccatcttctaaaatcaaataccgtttcatattatcacttacttgtttgttctagttgagccaacgtttcttgaaaaatttgtggtggttctacactaaactctagccattcgccagtacttggatgtttaaatcctaatactttagcatgcaaaaattgaccatgacctttcaaggttttacgtggaccgtataatgggtctcctgcaaccggatgtccaatatagtcaagatgaactctaatttgatgggttcttccagtttcaagctgacactcaattaagctataatccttgaactgctcaagcaccttgaagtgagtaatagcttttttgcctgtttcaactaccgccattttcttgcggtcatatggattgcgaccaattggtgcatcaattaccccattttcttccgcaaaattaccatgaacaattgcccaataaagacgtttgttagtcttatgagccaattgatcttctaatgattcacgagccttggcggtcttagcgatcattaataaaccagatgtatctttatcaatccggtggacaattccaggacgaaatccttctggtgattgtgctaaggccttggtgtgatataacaacgcatttactaaagtatgatctggatgacctggtgcgggatgcactaccataccttgaggcttgttaactacaatgacatcatcgtcttcatacacgatatcaagtggaatattttcgggtataacatctaacggtttaaccgctggaatattaacttcgattttatctcccgcctgaatcttataagatactttttcgactttgccattaactagaatattttggtctttaaccagttctttaactctagttcgagatagatcaggaatttgttctgaaacaaacttatctaaacgtcccttttcgttttttacttcaagtgaatattctttagtcatgttgttcttccttaccttcaataaaaattaagtaaatgaacacaaggattactccaacagtaattgcggaatccgcaatattaaaaatgttgaagtgaacaaaatcaagctgaagcatatcaactacatattttaaatgcaaacgatcaataaaattaccaacaattccacctaagatgagggctaaacccacatcaaacaaggtattcttgtactttttgttaaaaagaaaatacaagcaaacactaatggcaataatactgataatgtaaaaaagccacatttgaccagttaaaatgttccaagccgcgccattattttgtagataattaaaagaaagaattccaggaataatctggtgtacttctcctatagcataatgagcaacaatataattttttagtccttgatcagcaagaacgacaactaatgaaataattaaatataaaaattgcatattttttagaataatccactaattttaccattgttatcaacgtcaatgtctaaggctgcaggatgcttaggtaaaccaggcatatctagcacgtgaccagtagtgactacgataaaacgagctccattttttaaactaattccctttacatgaagcttaaaatcagttggagcacctaattcattcttattatcagtgaatgaatattgtgttttagcgataattacaggtaagttagccttgtctaactttcttaattcttcgatttgtttttcagctttttcgctgtattcaactccggctgcatgataaatcttagtggcgactttttcaattttatctttaacatcgtcattatctgcgtatgttggagttaaatttgctgcattagaattagctaaattaatcacagcttgagcagctttaatgccaccttttgaaccttcaccatggtaagtaaccacttgagcttgaacggcctgttcttcaattaattgcttaagtaaagcgagttcttgttcagtatctgaagcaaaacgattgatcaagacaattactggtacattgtatgaacgcatattattcatgtgtcgttctagattcttaaatccttctttcaatgcatccaagttttcttcatttaaatgatcagttgagcctaatgcctgatattttaaagcacgaacagttgctacaactactgcagcatcgggcgtcttgtccagatgtcttgagacaaagtccatgaacttttgcccaccaagatcactaccaaagccggcctcagttaatacatagtcgcttaaatgcaaagccaagtttgtcgcaatgacggaattggctccatgcgcgatattagcaaaaggccccccgtgcactaatgctggtgtgtgtgccaaggtctgtactaagttaggcttcagcgcattagacaatagtgcagcaattgcgccttggaatcctaactgtttaacataaaccggctcatcatctttagtgtagccaactagcatatcaccaattctactctttaagtcgttgatatctgttgctaaacagagaattgccattaattcattagcaacagtaatagcaaaactagcttggtgctcaacaccattgaatttagagccttgaccaaccgtgatttttcttaaagcacggtcattaacatcaagcccacgcttaagtaaaattcggtcaggatcaagatttaggctattgtcttggtagatgtagttatcaactaaagctgcaagtgtgtcaattgcggcagttaaagcatgcatatctcctgtgaagtgtaggttgatatcttccatagggatgatttgtgctttcccaccacctgtagcaccgccttttaatccaaaaacaggtcccatcgaaggttcacgcaaggcgatcatcgtattctggtgcaactgattgtgaattgcatcccccaagccaattgtaatcgttgacttaccttccccagcgggagtaggagaaattgaggttactaatactaatttacctaactttttactagcacgagtcctgttaatggcttgccaagtaatcttagccttatcatgaccataaggttctaagtcttcctctttcaagcctaccttagtggctatttcattaataggtaattctttggtttcttgtgcgatttcaatatctgatttcattattgcttattcttctttctagacatcattaaaacagaatagctttggtaatcactttttagttgataaacttgaaaattacgccaacttgaaagcaaagtcatttgattgatttttacttttgaacgatatggcaacttgagtaatattttgtctccacccttttgcaagtaagaaaaggaccaagtataaactgctaaaagtaagaaaatgataccaactactattccaggtatactaattgctttgttcccctcatagcccaaaataaaggcgataaatagaacgattaagagccaagaataatagataattcctgcaactcctagaaacatgaaatgccgtttagattttagaatttagatcacaccctatttatttaatcatgtctattgtatcaaagatttaatcaaaataagagggttgaacttacagcaattaaatataagtccaatcctctatcacatttatttactttactactgctatttcgtctctaacctttatattgcttgaatcaatgccaggtttttgaccgtgaagattaaagtctaaatcaactgtcggttgaaacagtaagacatgtgttgaaccaccaaagtggaacatgcccaattgctcaccttttttgacatgctgtccaatacgaacagtaatttcgttgtttgatacatctcccatacctacggctacaaagcacatcaggcctatcttagggttatcagcttgaataaagattacagcacgtgttgcagttgaagttaaaaaggcttgtgagtcattagcagctactggagcagcaccatttggattttcgaaaccttgacttaacgcttcaccatagtagctaccattgatgtgatatgctttaacaatcttaccactaactggactgttccaacggtgatagcttaaggcacttaaaaatgcttgataaatagtgccaccctcgaatttagaagtccaaggatcattatgaagtagatcaagcaaggaatatggttgccccttgatccaaaacttatttttcaaaggaacatgctctacttcttttgagttagattgagaagttgttgatgtatttcctggataatcaccagttttcgtatcatcagtgtctgaacctagtgaaatgtacgtgatcttaataggttcaaagtgatcaccatgtttaacaacttcaacagctttggcatttcgatttggagtataaccttgaatttctggggcattgtattcactaaaactaccaattgtccagttactatacttaatcaccttccctgttacttcatctaatgtcgcagttctcgttagcgttatcaattgactagcatcaatggtactgccatcaggcttgactaccgtaatttgacgtttgatcatttcgtttaaatcattttgactaacaccagttagataattcttacttggattatctggcaacttatcagttgactgctttggatcatttggtgtgataactattactttatgcttcaaatgaatatcaattggatcattgtcagaagctttaaatttatagctggttggtaacatacttactaattcataacctgcggggatgataaagtcaccatcatgataggttagtttcttcagcttggccttgaccgatttctgccttattagcattggcatcctggttaggctgaacttcgattggcttagcagttgcactaggctgctctacccccccccattttgaatttgaacattagaattttttactttgctctcagctaattgtctagctttaatagttgattcgggtttagagactgtcaaattattttctgtatgattttcaacagaattatctgcagtattatcgttttcttgagaagttggttcagcagccttaccagaaacatcatctgttttatctttatttaaaccagcttgcaccgaagaatctgctttcttctgtactactttcgcagtttgcacatcgctatctaccgtacttgcttgtacagtatttgtattaatcgcaccaacgtaaaacaaagttgataacaacactgaagtgacaccgatagataatttacgtattccaaaatgctgaacttgatccgcattttgctgtaatttatttttcagtgttttctttcctgtcaaagtcatatcaatcattcttccttatgtatgaataaatttttcacatcattatctagcaattgttattataatcttatttgtagttatcgtatcaatgaaacacaacacaaaagctctggtcttatttttaataaaatttcagattaaaaaagccgcgtccggtttagggatgcgactcgtcgatgttattaattttttaaatattcatctagtctttgtaaaatctcagctcttagtgattcaattctcttagctattgattgccacatgaatttatcttcaaagtggtcacaataagagtaatattcagcttcatttatgtattctaatgcagataatggatcttcatctgtaccataccctttgtacaaacatagcgctaaacgataataaatatctgatttaatatcatcatcaataccagatttattagcaaaatcttctgctttgatatagtactcaagagccaagttgtaattttgttttattgcatctccatagaagtaactatctcctactttataacaagcttctgcattaccgtcatctgcggcaatcttaaagcagtaaaacgccttcttgtaatcacgcttacctgtacgaccatattcataaatatagcccaaattacagatagcttgagtgttacctagctttgctgcatattcataatatttttgtgcttttaggtaatcaccattgcggtaggcctcagcgcctatatctaataatttatttgatttttggaatttatcgtcttcatccattattctgtcctgattatatcaaaatctctgaaagacatgtttatcgataatttaacaccatatcgattatatcctgtgcttgctgcaaatctgcagaactgatcactttgactttatctggtattttaaaatctttataatagccaacaaaacgtttaattatatccatattcactgaatattctcgatcacgattgcgctgcacaagagtttttaatgcatgatctagagactcctcactgaatggatctttggagtccaataatggcttaaaacaatcaatgacatatacttgataatcgactggcactcttttcagaatatcgctgattggattgaatccatgaccagccagattcgtattatctatgacagttggcaacttattctgcaaacgtgtgtctagttcttcataaaaaatatgccatacaattgattctgtttgcgggacaaaatttatctgagtgtgaccattattagaattgatcccatttaggcgaattctaatttcatctccagaaatagtatagttttgtaaattattcatcttaataaaactagatttaccagacgcttgtggtcctagcattaagattaaaggtatctttttcattttattggtcatcctgatagaataaatctctaaatttcttgtgtttatactgttgtgcaagttgcggtgtcttccaagcaacactatttgtccataattctgcaccttcaccaataactataacagactgaccgctttccgtatgagcaccataataaataccgtcaccagcaccttgcatccaggtgcggacattcaagtaattaatgttatggatcttcttccctatcatctgtgccatgccccagttcttagtagcatttctataagacttagacatgtcgctatataaatgatcgttagcaaatttagcgttaatcttatgtaattctagtgaactgtagccattatcgattttgttttgactaatcttaatagtttccagtttattatcagcagcaggataagtgtaccaagtcccttgtagttctgtcggcacatttaataagccatcatctccaggcaaattagattttttaccagtagaatttgaagaaacattattagaatctgagcgttcatcgttaactttggcatttttagccaagctattcaccaacttgtctgaatcccgtttgttcaaataagcaatcatttctttcatagtaactgattctagctttttaccatttaaaaagagataataaatatttttactatttacatgtttcaaagtatatcctgcattttcggaaaccatgtaggctactccgcaaccttcattcatatatgaataatctgattgattcttcaagtcaacttcgagtccgtttcgcttatcattaagcaagactttattccaactgccagagtaacgattacctgcataggcaactataactgcaacagttttttgtggacttaagtcctgagcagataaatgccccattcttgtaggcttttgattatttttagtaattttaatagttgcatttttctttgatgcagtattttgcttagacttttgactgcatcccgtcaaagctaaacctgctaacaaaactaacgatacttttccgatctttttcatttcatccccaactttctaatcaacaatattttatcatttatttatcagctaaaaagtggccagaaaaatgtttctagctgtcattatactttcggccatttaagcactacaatagtgtgtacagggatacagtcaaagtacctgcaattctaaatattaggaaggaagatttcatgaaatatctatcaagaaatcaagcagaacaatggctgaatcaacatacgctttacggtcaaaagaaaaatggtttcaccaataaatttatgagaacgttaaagaatagctatcgtttggttcctgataaagatagcatcttcggcaagaaatacagcatgcgcgaattaaaagaatatgcgaatgatgtaaatcctagacaaattgcttaagcaaataggcaccacttcaatgtgatgccttttattatgctctcatgtaaaccttcactaccagatacaaactcttgccgtcccaatgaaaagtcttggttttgccaaacaacaaattgccttcatccatcaaacgacttaagatcaaattattgctcttaggtaaatatcctagcttgagtccaccagttgtatacacgctaattgcgtgttcgtcaaattcattattgggttcacgcattaaagctagcggatcattttcatgcaactttggcacaacatgatccgctagatcaaggtattgactgccagctaattcacaaccatataggaaaacatcacgtgcgttgctggaattactatattgaagtcgcttgagttcgtccacttgcgtttgcaacttttcgacctgatcaagtaagtcttcaaaaatatcttgtggtggaacatggatagtatcgttaggattgtggaattgcataggtgtagtcctttctatggcatcatgtgtcacttaaaactaccttttttattcgatctaaaatttaaaaaatagaaatttccatcacttttctataaactcatgataaaggaagatcagaagggatcaagtatacattattttttgttctagttaaggcaacatagaatttgtttttggaaattgatgaaatttcactaaaattatttctatttgttgcatctgtcaaagcttcagtcaaaaatatagctatattgtcatattctaatcccttagactcaccatagtttacaaatctagattcatcaacaccatatttttggataattttatttcgttttcgtttgtcatatgtaagtaatttatatttttcgctcattaaaatatctttaaggagatttaatgaatttacaacattaatctctccttcattatctactgaaccataaatatttatttttaaattagttcgaatataatcacagatttttttcggtactcggaaacttcgattaagcgaagtttgatctaatttaagatatgttttttttaatcctaaattttttctagtaaaagcttcttcactcatactcgtcttaaacttatcataaggggaagactttttagaagttttagtgacacacgactgatataaatctcctaccagtattaattgtgtatgttccctcttgtagatagatttagacaacttatttaaaatatgcaactctggattaactacatcctgaaattcatcaaaaattatataatcataaaaattagataaccgatctattgcactttcaaacacttctttatttcttatatcagttaataatgcagcgagcttatcgccatataagtcccctacactattctcccaaaatttataggatgcctttgatataaagtgtttaaaatttttgaccccaggttctctaaaataaactcctttaattttataaggtaattgcagatttttttctattgataaactatacggtttgattagttctctatacataaattcataaaacgttaacacattgtatccgttaaaatttatcaaacttttttgaagcttattttttagattttcagcattcatatttgtataagttatatataaaacatttttgttctctaatttattttttaatccagaggtaataaatgttgttttacctgtaccagcttttgccaaatagattattccttgagccattttaaacctttcactatatactcaggtatctgataaacttccttctcataatttggtaacatagcaagcgcactctctgttttattatttagcatatacgctaattgttttgaagctacgtcattgtcaccatgtttgcttgttttggcgtatggattaaccggaaacttattctctattatagatttattagaattatactcagaaacctcaaaagtataattttttgtttgctgatcacaaaagattttcaccgattctgttttcttattatcgtcatctattttatttattcttttgtctgctggtttttctacatcagcatcattatcagtaaaaatagccattttattatttgcatactttgctaaatcaataaatggctgataatgtcttccacctattgataaaatttcaaaatctaatctgtcttctttacatacttttttgataaacgttctcatcaatatatattcagcagctccttcaactagaattattttctttgccgtcaaaagacgtaagaaatcaacatcatctcttcgtttaaaaaattcctttgtttcttcgcttaactccgatttgatagtagcttgcttcttcaatccattttcttctttgatccagatcaaattttcaatatctaaacctgtaacaatatatgaattatgagtagtaactataatttgattattaatattattcaattgatcaatttgttttctagtattgcttgcagttaaatgattctcaggctcttctattacgattaaatgtgcagaatccgtattatcttgatttaaacttaattgtgtttttaaaagattttctaatccactacctaattccttaatagaaattcttcctgaagtaacatcaataattgaatcaaactttaaactgtttgtatctattcttaaattatattccgcaagatcatttctattaatgtcatcaaacaagttgttattaataaatccaaatttgctttcaacttgaactctttttttaggtggtaaagtggaatatatttgtctagcaaatatattgaacggattaccttcaaaactatcattatcaataaatatacttttcaagggatccattctactactatacacatcacccgagagagttctatggtctgttttatacattccatatgggattataaagttatttttataatctttatctctaatcaactcgttgtattcatctttaaaatcttcgtcaaatgaatatctaaaagtaataccataaccatttcttttaatagacccattactatcttggtaatttccacagaatcgtagtagtttcagatttctttgatccgtttcttctataccaaaaatcactgtcagatcaaaactaggtaaattagtatacaaataatttttggaagaaataaaattatttacaacttcatcatttatataatttgccaaatatgaaataccattatattcgtaccttgaacctttaagtaacagccttaaagcttgtacaatcgtcgtttttcctattccattatcccctacaaggatatttttattttgattaaatgtaaaaattgcattgtttttatatcctttaaagttatttaatattagtttttttacgtataccatatttttaccctcttaaaaaatacaatgtttactaatcattaaacatagaaaataattaaaattacccatttgtttaaattttgctgtgttaatttgagttatccattcatgtatgaaaactcaaaaaatctaagttaaatacgtcaataacatatacatgttaataaccaaatacttttacttcatcatgaagataattgacttactacgtaccaataaatttgcattaacttacgcgtggtgctagttaaatctttctagacaataagccaaattataagctaaaattgcaatttccaaccggctttgaaagcctatcagactacgtgctcgattgttctcggcattgtaataggtcagaagcgaaaagtcgctttcaattgttctgcgaatagccatcaattgatgatcattgtgctttttagctcctgtcatatttttacgatatggtgtccaaagttcataacccatttgttttagctgttgatgcagttctttgcctaaatagccttcgtcgccaagaagatagtaattagatggatgggcattttccagcagttcaactgtctccttggcatcatgaactgatgcttttgttacgacataatcaagaatggaaccgtcatcgctaacaatggcatgaactttgaaaccatagaagtaaattttcttggtggccttataaccaatgttggcataaccgcgaaaaattttagcacgatagttgcgaattggttggcaaacaggtaccggaaagctgtcaatgatcaagaaatgtccattcaggtcaacctttttattcatttcttgccgtatctgataaatcaattgcaatagctgacgtgaacgccgattaaaacgtgagtgtgataaacaattgaaacattcacagaatcttctttgtgattcaattcctgtcttagcttgccagataagtaaagccaaaatcagactgtccgtagttttaatttgatcaatatttcgccgatgagtaaactcagccggtgcatacaaacgataccagtgccgacaaattatcactaaatctttaaaactaacttgtaaatggtggctaaaacgcttaagcttaaggcagttcaatcagatcaggctcttttctattattatacaagttgagtctaacaagattggacttttttattaactaaaacgatttaactagcaccacgcgtattaacttttataaattaaaaataacaatcgattaaataaaaaacagaaattatatctaaagctccaaatagctataaatagatacgctacctcaatcaatcataattgaaaacattttcccaaagattctcatctattttcaactatcggtattagatatttttgtaagaaaggtctaatgttcttaatcttactcgattaattttccgcttaagataaaatttgttttccctgacttcagtgtatcttaaaattttaaatattattgtcctgaattgtcaaattaagtgcaacagttaggttatgaagagatatattgcttgaagagttcttctgctgtctgatattggaggattcggcgatgtttgcggttaatggcatcagttgcctgttgaacataagcagctgacttatctttcatgcttttgcccttagggaagaattgacgcagaagtccattgcagttctcatttgtgcctctttcccaaggagaatatggatgagcaaagtagatctgacatcctttgatcttggtcatatccgcaaactcagaaccattgtcaaacgtaattgatttaaaccaattaggatgtctgtcaatctccttttgaagcagtctttgacaagtactgacccgatagtcaggaattttgataacaacctcaaaacgagtggttctttcagtcagtgtcattaaggcaggttgatttttacgtctgacgcctttaaccaaatcgccttcccagtgcaggggaacttttctgttttcaacttctttaggccgctgttcaatcgaattgccaagattctttttatgcggagcatggccaccatgactatgatggcgtttgtttctgcgtcttttaagcttcattggcaggtcgatattgcttatatccagcaatccttgatcaatataacgatagacagtgggcgtgctaggacatggataatttggcataatcctgtgaaattcaccgacaaattcatcgatgctggtggcatcaaatttagctttaaagcgtctgcttagcattctgaaaaagacggcatagtgttgcagtggattacgcttatagcagtttctgcggcgcttttcatgataaatttgtgcagtatcagcgtaatagtgctcatacaagacatagctgctgtctctttgcaggacactgcctcgtctaatttcacggctgatagttgatttatgacagcctacttcttgagcgatagcagtgcaggatgttatgccagaatcaagcagagcttgaatttgtccacgttgttcgctgttcaattgatgataatgcttggaaatgctagaatttgagttggtcatgaagatcttcctttcttgatttttggtcacttcaagtttaggtcttcatggcctttttgtttaacacttagtgttgcacttcaattttaaatccgggtaaatattattgtatagtagattcaactttatgaagcaaggcaaagagctgtgctactttagtagcaattcgactttgctcctttagcggtggaagtggaaaagacaaatgttccatatttgttttagtaatatgtttcatcgtagaaccgtgtaaatcagtctctcctatcacatttctttcatctaataaataataatatagataatttttatttattacgataggattaaaatctagcttccaaatatgataatgataaatcacacgtccaccattccatattttaggtccaaaagaggcagaccaagcataaattaaatccccagaattaatatatttatcagcacttaactttaaatctgaataaaaccaagacgaatttgtaaataaattacctactctcaaaaccggagttaatttactattcgtaagtaattcatttttcttatatgctcttccattaaaaaaattaactcctgatcccaatacgatccatttccatgttttaggaattgtatgcggttgttttttactttcttttaacaccttgagcttcttcaacaaaacccctgcgggctcatcatggggatcttgcccgactaattttccacgcattgccaaatccagcaccttcgacttcagcaaagtctgaagttttgcgtattgttgagtagaagattcgactttgcgaagcaaagcgaatagctgcgctattttagcagcgattcgactttgctcttctagtggtggaagtggtatcaaaagattattagatctaacaatcgttagtgtagctactgttgttcctctaccattattaattttcttcaacatatatggactttgaactacgtagctaataaatttaggatttaaattaataaggttctttagccaaataatatttccgtctttaaaataaaattttttatcattatctactatatacggaacccctagtgtaccaacacctgttagaagaatgtcattaatatttggcttacctgatatttttatcttcccttcataagtttttttatctatgaaaataggatcttttaaaggtctatgatttttgatacttacaatttcacgagcgcgataaaatggaatacctgtatctttccattcacttttcattacccgtttgctagatgttatatcaaataagtctcccaatctaacccattcccaactttcaggaatatcaaatggcttctcatcatcagtaatcggagcaagcggcttacttttcttaatcttcttttccttaattagctgttctttttcagccttgatcttctcaagcaatacactagctggctcatcattgggatcctgtggtactaatttcccacgcatggccaaatctaagattttttctcttaaagcctgtgcatcaaaatctaaagtattagtcttcatcgtcaattccttctaacgccttattaagttccgcaattgcatccctaatcgtcttagatttgtcattcatctcatctaagatttcttttaatgaacggttatcatgctcttcttcatcattcatccaagaaatatcaaggctagtattaggacgcttcaaaatttcatcaatcgtaaacttacgccatctaccattaggattcttatctttatcccaagtttcttttctctttgagcggtcatcaacgcagaatagtttttcaaattccgcaaaatccttttcatttaatggattacgcttaccaaatgaccgcatctggtgacgcatatcataaatccaagtttccttggtattatccttgtcactttcaccgcgagtaaaaaacaacacattagtctgcacaccttgagcgtagaaaatcccagtaggcaatctcaagatagtatgcaagttacacttgttgagcaagtcttttctaattgcttcaccaacgctatccgcaaacaatacattatctggcacaactacggctgctctagctttaccatcgtgcttaagtgaattgtagataatttgcaagaagttaagttgcttgtttgaagtctcaaaggtaatatcgtcacgactagccgctttatcgttatcaattccctttttggtaccaaatggaggattggttaagacaacatcaaaattcttcatccaattaccgtttgctgaaagagaatctcctaattctaatcgcccattcatcccatgaagatattgattcattaaagccaaacgatgagtagtttcaacaagctccatcccggagaaagcttcattaacttgaaactcacctttttcttcagataaagatgagtagtcatcatttttatctttaagatactgatcagctgctaccataaatccaaaggtaccagcagctgggtcattacaacgatctcctaatttaggccgtgtcattcttaccatcatattaatcaatacacgtggtgtaaagtattgaccagctccggacttaacttcatttgcattcttttccatcaagccttcataaagatcacctaagccctcatctctagctgaccaccaatctaggccatcaatatctttaataatcttttctagacttgctggcttatgaattgaagtagatgcatctgcatagattgcgttaattctagaacttttaacaacttgaggattacctaaatcaagtaatagttgcttatagaagttacttaattctaagccgtcctttgaaacaaggttatcccaacggtatttttctggaatatcgttctcttcaccttgttctttgctcatttttaagaacaatatataagttaattcagtaatgtagtcttggtaactaacaccatcatcccgcaggacgttacactcattccacaacttttgaacgatttcttgatttttcacttgggtttgctcctttgttttgtatcaattttattattttaccaaatattagtttggactacataacttttatttacttaatatgctacacaggccatctatatttattacaggcatagcaccaaattttccttgtaaatatcttttagcaaaagaaatatcatgtcgacctatattgcgtgcgtcttcaaaatcaaaaactgattttagattacttatcccatgaaaatctttatcaattaaatagatttgatcaattcttaaatcattatccattaattgtacattatgtgtagtaactataaactgattcaggctttcctttgaattaaagatctttactaatgcactagctagttcaatatgaaatgctttactaaaatcatccataactatagttatatcattgccctcattttgagcaaatactatacttaatacaatttgtagaatttgctgtaagcctgtagactcattagctagcttaatttctttcaagccaatcattttatcatgatcgtaaatcttatgaactatatatattcttttcaataaatgatatggcttatccttaagtctaatattataaatattaagatcagcaaaatttagaaaagatactatttcttttctcaagcctttattttcaagttggctcaaaaatttttcttgactaaacattgcaagattatcatgaataaaaagtaaatcatcagcaaaccacttatatatagcaatacaatctgcatcattttcagattgtgctaaatataggaataaagaattatttctaagcttaggaatgctgtcttctaaaagcttgttagaaacatgaatgtcatttccatttcgagaaaagatgcttttttccttattaccattaattaaggttaatgcttcactggtaatgctctctcgattgtaactaaatgaatagtcataaattttattctttaactcaagcttcacttcaaagtaagtatcttcaatcttggacttttcatcaaacaaaaaaggataataatttaacttatcagttacggcttgagttggacgtgttactattccttccattgtttgtaaagcttgaatcaattgagacttacctgaaccgtttggaccaaataacagtaagctttttaataatgatggatttttacttgagaaagtattagtttctttcaatttacgtagtctattgcctgtctctgcagacaaggtagtgcgctctttaaaagaagcataatttttaacagtgaactcgattaacatattgtattcctccgtgttaatttaagtttagcacgcaccttttttatcacaacttttcgtggttaaaagcaaaaaatgccagtaatggcatttttaaacatataaattctcattcaacacgtaaataatctgatcagcattttctggaaagatcttcttaatttgcttataacccccgtgacgtttaaagaaatagttatcatcaaaggctttctcagcatttggccccaatacagtagatgaaattaattggttctcaattctcttcaaccatttcttttgaggaatagtccaatcagctaagccataaactttttgcatagcattatgaattctgacatcatgatccaccaactcagatccagccgcagcttgtctaatgaagctaataatatcggcagtggtctgaacatggttaacgtttttccatgcactttgcaaatcattttctttaaagccattttgctctagcttaagtttaatatttttgagttcatcaaaagttaaatccttcggtctagtagctacaacttgtaaggctggaatagtattgacattttccttaacgaatttattgaagttttcaatataatccgctggtttttgattgccatgcccataacctcgacttacattaactactttgtctactgcgtcagatattatttgcttggatttgactgggctaatgtggtctaactgctcaaacttaggccattgctttaaaaattgtgacttatctaatttacttaattcacgggcccattgatcaaccgaattaatttcagccagatgttggaactcatcacgtttagtatcatccaaacgtttaatttttctctcaacggcaccagccatatctacttgatactgagcggaatcctcatttgtctcaaagaaatcatccttgtgatttaagaagtagtgaacattatgtcctggatttttaacaacaggcttcatgtttgtcactttattcattgcttcatagattccgacagcatcataaatcgtaaatttggatttattaatttcgggacaaagtctggttgcccgtcccaacatttgctcatagaggattcttgactgaactcttcttaagaagacaatactagtaatttgcggtacatcaattcccgtagttagtaaatctacagttactgcaatattggggttggtttcgttcttaaagtttttaatttcttgattaggatgccgaattgaaccagtaattttttcgatagcatcgtcatctacaggattacccgcttttttgaatgcttttttcaataagtcaacaaccatatcagcatgttcatcagttgccgcaaagattaaagttttacctaaatttggatcacttggatcaagatatctttgagctaattcatcacaaactacttcattaaagctacgtgtgataactctcttattaaagtcttttacatcaaaattcatattatcaggtaatttttctttattgatagttttttcatcctgatcaaaaagactaacctcggcaccctttttaaaatgaatcccttcttgagataattgagtttgaataattactggtgcatcatggtccactagccacccatcaaggacagcttgttggtagctatacgaatacaccggtttgccaaaaatatcaatcgtttgtaaagctggcgtagcagtcattccgatagcaatcgcatcaaaataatcaactacacgtctatattgactaacataatcttcttgactatagaattgatattctttatcgctgagctctttatcttctgcataaccacggtgggcttcatcaacaataatgaaatcatattgaccaacggatggcttatcatcactgtcttcactgaaaaataggcgtttgatcatcccctgaaccgttgcaatttgaatttttgttgatatttcaggtgccttatcactcaattcctttaatccataaatggaagaaattgacatcatacctattttattatctttaattgcattggcagtctgcttccctaatgaattacggtcaactaggtaaagaatacgtctagctctcttatgcttaagtagtctgtacattaaagcaattgccgttctagttttaccagtacctgttgccatggcaagcagaatacgcttttttccatctttgatggcattttccatcgcttgaattgcagtaatttgatattcacgatgtgcaaaatcaggaaaatcttgatcatctaccaagtcttgatttgcttcttctttatttttagcagaaagcttcaacgataaatcttctggcttatgaaattcctcaagagcatatgcgctttctttaggattacgtgcatcccagaaccaaataccagatttttcctgatattgtttaagatatggacgaccatttgcagtatagatgaatggaactttgtaatcacccatttcatttgaaactagacgataatctgatctaaacggtacctctttagaatattccttaggctgtgccatttgccctgcaatatcttggtcccactttttggcctcaacaattccgtagaactccaaacctttgaataatgcataatctgctcgctgaccattaggtagaacccattcagcaattgccatattgtgacctttttgcggtttagttttctgcgtccaattgttcaatttttgtgaatctacttcccagcccgcatctcgcaattgttgatcaattaactgacgtgtttctgcttcagttaactcatgttttttagcaaactgaacattaatctgacgtctgcgttcacgctcttcaggagaaattatgacttcctgcaccctattttgttgtaattgctttatcttttcttcgagagctttgattttatcttcttgagttttaattaaagctttttgatcttgtggctcaacataatctgcaacttcatccagagaataaacttctaaaaaccatttccatactaaataagcactctgatcaatttcaagcgcaatctttttggtagcaataaaatgatcgtcatgcgctgccttgttccgtcttaacctgatcaaattaagagcattcaaaacagtaggtggatattcattcttagaatatgccattttttcaattcgttgtttttggtttaattcccaatcacctaaatcatccaaatgcatgatttccttagttaattgctcaccaaaagttccgaaaactgtcaaactacttctaggatcagagtaaattaagctttcagcgctggaagccaattttgcgtattcttgataatctttttgtgaagtttcaaagttagacattgtttttcctctaaatattaaagtaaatatagttttattctaccccgaagccccatttaataacaagtagtgtaggtacaaaaaaagaagcaccaacacagtgcttcttttaacataaactaaataatcaatcgaaccctacttcgctaaaacatattcaaatcccaacatattggtatagcgattactacctatcttaatgtaatcatagcctttgatcctcttggtgccataagtttggacataattctttgtcctggtattctttgacttgatttcgtcaacttttttaccctgggcatttaccacaggtgttacagtttggacagtgtagtaacgtttgaccacttttagcttagatgcttcgaagttgccatacttaacgtatttatttgcaccaatcttgacatatttttgccctttaatagttgtaatggcttgaatcttataagaagtattctttttcaacagctttctagttttcacacctgcagcggtataaacgtatgcattactttgcaatttctttttcttgccaacagtaatgccatcagtgattaatgggctaatatcgactttgcgctttctaatggtatctgaagaatagccaaaccaaaatggactcttcttggtaacatcccatactggacgagttgttggatattgccaattacgtttgctgttataaagttgaacgttaagtttgcctgtaacttgcggctgatagtaattgtagataagattcaacactttttgaacctcataagtagttaactggtcagttcgtctaacaagtaattttttaccatcaagtgctttggtgctattagttaaaaacttttctgcttgactaactgcaatttcactagcatctgcatcactagcaatagccttagcttgctgtaaataagttgtaaattcaatcttcttatcataatcagctaactgatagcgatctgtcttttgcacattttctgcagtggagattgcagcagtcaacgatgctttgttagttgccactttagcaagtgactctgcttcgccagctgtgtttattggtgtaagcttcacaccttcaacctttttgacatcactagctaagatatagccttcattatctaacttattagtcttagcattaacttcacctgttgtatggtagaaaagttcggctttcttttcacttggcacccaaagataaagggcttcgttaattttatggttgctatacattgcagtttcttcaaccgtattggtataaaactgtttagatagctcttggctagttttttcaccgtcaacattgtacaaaggaatctttttatccaagacaactttggtagaatcggccaattcaagatctgaatgattctctaaagcttgtggcaaattcagatcatcttctgatacccaataattagtgcccttgatccggtagtatgaatagtgatcatgatcaaagtctgtcaattgttgtgggaattgtcccgcataatcaactgtgatcttttgtcctttcttcaattcaatattatttggatctgtaccccaacctgttgaattaacatactttgtaatggttgaagtattcttattgaccgttacggtaattggtgcatgagtagtaagacgatagccgtcaatgtaaccgatgttggccaccttgatataacgaccggaacctaaataatagtagtcttttccattaattatggtataaggaatgcgatacttacctttttgagcctcataataatactttgctttactactagtagttttccgcttaccagcatatttgactacgctaccctttttgacaaaaccaacttttttgccagacttattgtaaatattggcattaaaaattgccgttaaataagcagggccagatattggcgttacataatctgaagaaatataaacattcttgcgtaaaggatagtataactcaccagcactgtagtcgcctggatcaaccgtcttaaaaaatggttttccatagtatttaatcgtgctgcctttcttaggtgcagaaatatgatccaaataattgcccgagcgattgtacaacataatatgtgaatcaatgacttttaaggaaccagttgcattgcttttagtagctgcggcaactgatgtttgaacgtttgaagttagtggtgctgcggcaattggagacacagccaataacgcagtagaaattaagataagttttttattgattttcataatgaaccttcgatctaataaatgcagttaagatttgatcagttagtactcatatcatcattatagcagttatagttatttattccttgatattgagcctatcaaaaaagagatcgaaacccagtgtctcaatctctttcgattttattttgttttcttcttacgagtccataatccacttaaactcaagccagacagtaataaccctaaccatgaaagatcactatcttgcctaccggttgctggtaaaacagacttagaggccgatctcggtgtaatttgttctactgtatcgtttttcataatagaagtttccgttttacagcaactaatctcactaccacttaagcttcagtttatggctactttgctctacctgtaaaaatgaatcaacgtagcgcttaaaaccaggtaaatatttggcaatcaaatgatattctcgtgaattaacaatttctttcttttgggctgcagaataattactttcacctacaaaaaagttccaattcaattgatctataaattttatgaccacgttagcatcatttttatctgataaagcttgcgcaatctgatttagttgcttttcatccaaactaaaaaacaaatgcttcaaatattgcgaaaaatctgttggcactttttgcttttcttccgcagttaaccacgattccattttgaaggaatgcacctgatattgcatccccgcttcgtctaaatatagctgaccatattcctgcttagtcatacaaaaacaagctcctgctacctccgcaattggtcgattagcaaacggaccaataatattctgtgcgtgcatatggccagaaaagactgcttttacattatatttttgtaataaaccttgcagtgcaagtgcattatcaagaatatatccctgatagattactttattatggcgatacagattatgatgcataaagaatagcacttgttgctgcttttgctgcgcatcaattaattctttttcaatccagttcatttgagattctgaaattcgaccgttagtaatcggatgagtttgtgattcctgcttgccataaatatttgagtcagccaatattagtcgatactgcttattcagattaacgctataagctagtgaatcaggatcttcatgtaaagcataatgataagaatcagcaaagatctctttccaaatagctgggctaatttgcggggtgtaatcttcatgatcacctttaaacttgcgagcccagccgtcaaaaatatcatgatttcctggtaaaactaagaatgcaattttatttttagttaatggcttaaaaatattagctaaacgttctcctgatattttagcgccattaaaggttacatcaccagtaattatcactgcagtgggcttctcttggattactttacgtacaaacgcggtcaaagcaatctcctgataatctaagtctttacctgcactagtgttgcgcatatgctgaaaagcaagaccatcatcatgtaaactatctgcaattagatgtgtatctgataataaccaaagaattggcttctttttactagtaatcacaatttacctttttcaaaaatctattttcactttaactactcatcattataccaacaaaaaaggcatccctgctagggatgcctcattgcgataaaatattgaattaagcgtcgatttcttcgatcttaatgttaactacgaatgcttcaggagtatcagtgcctgaaacgatcttcttagcgtaatcgtcgccttcatgaatttcagcatgtcctaaaacacgaaatgccttatgagtaggaacatcagcgacaacaatagctgctactgaaccattcttcaagtttgcataagcagttgacttagtcttttcaagatattgaatagttgaagcatcaattgccttaagtgaagccttaggaccaacttgtggcacaccgttagcattcacagttgccatgtatggtaagtgtgagttaaaaaattcaatttgttcatcagtaagcttagtagtatctaattttttcataaaattcgacctttcttttcttaagttcattattaattataagatatttgctataaaatagctattattttgccttagcttaattgattcttacatttatcatacacaagatattgtatttaataaaatgtgtttttaattaaatttctcttgctactaatatttttattaagtaaacagtcgttgatatatcaatgcttataaatgctggcaaaaagtcaaggattgaattttattttttagccagtagtatattatcttgcattagttaataagtgatacaagatattgtgcttattaaaataaaaatatattttaaatttcatttttattaatgttatttttagtgaggagaattcgatgacaaagaaaggcttaacaaaatatttatcaattggtgcagtaactactgcagcattatttttagcagcttgttcaaatcaaaagagcactacatctgctaaaaatagtaagacagaaattactatgtggcacgcaatgaatggtgcacaacaaaaaactttgaaacaattgactaataaatttgaaaaagaaaatcctaacatcaaagttaagctagaaaatcaaggtaattaccctcagttacaaggaaaaattacttctactcaacaaaatcctaataacttaccaacaatgactcaagcttatcctggttggctttatcaagctgcgcaaaataagatgttggtcaatttgactccatacattaataattcaacttatggttggggctcagtagccaaatctaatattcgtcctgaattaatgaagggtgcgcaaattaatggcgttcaatatggtattcccttcaacaaatctattgaagtcttgacttataacaagaccttacttaagaaatatggtttaaaggtacctaaaacaatggcagaacttaagtctgtttctaaagcaatttatgaaaagtccaaccataaaattgttggtgctggttttgataacttagccaactactatgttctaggtctcaagaatgaaggacaaacttttggtcgttcaatcaagttagattcggctgcctctaagaaaattattaacttctacgcagatggcgtacgcaatggctactttagaactgctggtagtgaacgttacctctccggtcctttttctaatgaaaaagtcgcaatgtacatcggtacttcagctggtgaaagctacactaagatgggtgtaggcaacaagtttacgtacggcgttgctcctcgtcccggtgaatacactatttctcaagggactgatctttatgtctttaaccatgcttcaaaagcacaaaaaaatgctgccatgaaatatatgaagtttttgactagcaaatctagccaattaacttgggctaatgagactggctatattcctgttaacgataatgtcttaaatagtaaggaatacttagacagcaagatgaaattgccaagtgtcttaaaggattcaatgaagcatctctacagtgttcctgtagctaagaattctgactctgcttataatggtatgaatcaaattatggaaaatattttaattgctgcaaataagcatcaaaatgttaatgctcaaattaaggctggtcaacaaaaattagatagcgcttggcgtcaataatgatattaaaaaagcatccccctgtagtgaccctcgaaattcggacatgaatctcgagggttttactatgtctaaactaactaaaaaggataaaattcatatttttgaagaatggactttagaaaataaacgtggaacgtacttaagtaagaaatatggtatcagaagagaaaaggtaaattatctaataaatttaattaaaattcatggcttatcagtacttgataaatcttatacgcattactcaaaagagtataaagaacatgccataaaaagagtgcttttaggaaatgaatcgattaatgcagtagcacttgatctaggtttgcctggtaatggtatgttaagcaattggattcgctcttacaaagaaaatggatataatgtcgttatcaagaagaaaggacgacgaatccatgagcaagaaagagttaaacgaattagaacggctcaagcaagaaaacgccaagttgcgtcgccagaatttaaagcttactgtcgaaaacgcatatataaaaaaattggatgccttggttcaaaaaagaaagagccaaccaaaacagaaatagcacaagctgttaccgaattgaggcatgaactggggctcgcagtaaagaagatcattgaaattattaacgctaatgaagatctgccgcacatctcgcgcagtaactactatgacgtttatactcgtgaggataaggatcaagttcatcatagtgatgtgatgatgcgcattcgggagatctatgatgagattaagaatcgttatgttgccccaggttatcgtcgtattacacatattttgcatcgtgaaggctatcagattaatcgtaaaactgttaatcgtttaatgcgcaaaatggatttgtacggttatgtgatgaagcgtagacatccatatagcagctatcaaggagatattaaaggcagaatcaaaccagacttaattaaacgcaaattctttgctttaagaccgaatatgaaatggtataccgatattaccgaattcaatctaaggggtaagaaactctatttatcacctattattgatggctgcggacgtgatatcgttgcttataatatttctcgtcatcctaatctgaaacaagtgatgtcaatgttggatgatgcttttaaaactaatcaggcactaaatggtttaatctttcatacagatcgaggctggcaataccaacacaaggcttatcaacatgaactagctattcgcggtattgaacaaagcatgtctagaaaaggctgttctccagatgatggcttaatggagggcttctttggcattctcaaacgtgaaatgttctatggtcaggagaagaaatatgcttcacttgacgaattagagcaagctatcagaaaatatatagactattacaatacggaaagaactaaggataatagagtagagggagttttataactcgcccctctcattgcaccggacgtacggttccgtatccggcgctacgtttgtgattatttacgagataaataatattctagcggatcgaccaagcctgggcgatccgctttgcttatgccaaatacttttgggctaagcagaaagttaatgacatgacccgtacttcttttataccaacctaagcgcgtattagctactttatgaatatcttcatcactaaaattgcactttagtgccttgttaatccgcattaagttaatgtatattcgttttggtagtttccattgtttaatgattaccacccgtactttatgacgcagccattgactgaacttaattagaaaatatttcatgtcgccaactctaaagtaattgacccagcctctaactacttgatttatcttagtaaagactagtgatagaggctgagcagctgcttttctgcgacagagaagttctctcatcttgtcataaagcttgattttgcggtcatctcctggctttgcttgccagtattcgccacttttccagaaggtaaagccaagaaagttgctcttggttggtcgtacaactttggttttggttgcgttgacctttaggaatagctttctttctagccatgatgaaattgaattcatcacacgtttggctgatttaccgcttttgacaaagatattgcagtcatcggcatagcggacaaagcgcaggcctctttgttccaattctttatccattttatctaaatagatattggatagaattggtgaaagagggccgccttgtggtacacctagtttattaggcttaacccaaccatcttccattactccagctttaagaaaggctcgaattaaatggagggtggttttgtcatttacttgctctctaattattgaaattaatttatcatgatttaccgtgtcaaagtatttctcaatatccaggtcaacaacccattgatagccttcgtttaaatattccaagacttgttcaatagcgtcatgagcactgcgtccaggtctaaagccatagctatgctcactaaaatgaggatcatagatcttcattaatacttgggcaatagcctgctggattactcggtcaacaaccgtgggtattcctaaaggacgtttcttaccattagctttaggaatgtagactctgcgaacagcttgcggacgatacttcatcttcatgatggcgtcctttatttctacttgatgctttttaaaatagctatcaagctcatcaactgttctcctgtctacaccaggcgctcccttattgattttgactctcctgattgcttccttgagattattttgacttaaaatctgttcaattagttccatctcgtgatatctccatttctacttgtaaatttattcagaattgtcccaattgctttcaccatcaaagagttacgttctctttgtgctaggctatcctcttatccggactgtctgaacattgcttatagcgagatatgctcttacaaacattaggcccttcgctccagtttcattacaaaaccttcagcactactacgacctcagctgacttctcgcgattaacctttttcgaccaggcttacgatcgctgatattaaagcttactcggtttcacctgtccacgagatctctcggggtaagacattcatctttaattttccactgccccctggtttaccgtcttggttttacggttgtcctttggactttaacttgtgctgcagtctcatccaccatttggcctgaccaggtttctgtacgtaggctcggaaaactcgctagccacttccttcacccatagcgtcaccgctaacggcttgtggttcgctacacttggcgacaactacccgtgatctagactttcactagactagacaaatgccatgcccgacacacaactaaaagaacttactccgatagaatatcggaataagtccttagtcgcataatatcaataaagtgtccgaaaaatgcgggtcactacacccttctctattttgattagggatgcttttttgcatttgcaagagttgaatttaatttaagcactcacaaggagtgcgaccgcaatatttagtactaggataaaatccaatcctaaatatttggcttcatcaactattatactatgtcaaaaatatataaagaagagttaacacataaaatacaaaacaaaatcagtgcgaaactcccacatttttatgttcacatagggttcgcactgatttttttcttaactcaaatctttcttagtaactgccaaatgtgccttatcattgataaagacccagattggcaaatctattcctgttgaatcagtcaaattatttacaatttcactgataaaaagctggaccattttcttaggcggttcagtaaagtctcttctttgcggcgtgtaccataaacctgtgattggctttttagtttgtcgatcgaaaatacaattcagggtttcatcatattgatcaaatgaggccttgtagactatatgtaatggatgatgtgccaagttctcgactaactgataacgcatatcgtccgcaattcttcctttactaatcatcattaaactggtaactggaccattttctttttcaaatttttgcaacttgccttgtttgactagcttcttttcaactgaaataaaactatcagaatcaactaacatcgtttttccttctctctactatctattataagcaagctgtcaattactttacataattttgcttattatgcaaaaaaagaagccatgacctgaaaatcatgacttctcgcgaattcctcgtccgtaaatcgaaatcttcacgaacatttttaccttaacacaattaattatactagtctaattaattttaattactaaagcttcatatggcttcaatgagatattctcttctagtttgccatcttgtgcagaataattgctcaatacgagttgataattcttattttgatattgttcgggcaatggtgctacatgatcagtaccatagaaattagtgaaaactaatatttttttagcttcatccttcaaaaaacgttcataggcaaaaatttgtggatcatcttttaaaaacattctaatatggccatcagaaatcagttgttcgtgcttacgcaacttgatcaatttttgatagtaagcaaaaatttcaccctcgtgtaattctttttcaacattaattctatcttgatctgttggtaaaagccatggctttgattcactaaagccagcaaatttactatcatcccagtgcatcggcacacgagagttatctcgtgctttagtttttactattgcaaatgcttcatgatcgcttattcccttttgtttcaatgccgcaaaagcatttttagcttcaacatctacataatcatgaattgaagaataatgtggatccatcattcctatttcttcgcccatataaatgtaaggagttccgcgcatacaatgtgtcgcagtagcaagcatttcggcagatttctctcgatatttaccagtatcaccaaaacggttaagggcccacggctggtcatgattgttccagaacaaagcattccaaccgccaccttgatccattttttcttgccattcagtaaataagtgctttaatttcatgaaatcaaacggctctttagtccacttttcaccgtttttataatcgacttttaaatgatggaaagtaaagaccatggacaattcatgctcactcggcttagagtactcaatcgaattagcaatagtagttgaagacatttcacccaccgtaattgagtcaggatcttgaccaaaagtagagcgattcatttctttcaaatattgatgcactactgctgtatcagtataaagactcttttcctgacttggatcaccagttgaatcaactaacttttcatccttaccggtcacgttaattacgtcaaaacggaaaccatgtactccctttgaacgccagaagttaattactttgaacaattcttgacgaacttctgggttatgccaatcgagatctgcttgagttggatcatataaatgtaggtaataataatgcgtatcaccaaattttgcccaagctggtccaccaaacttactttgccaattattaggcaaggagccgtcaggcttagctttccttaagtaaaagaatttgcggtacttttcgtctcctgccaaagcttttttaaaccatatattttcggttgaacaatggtttagcaccatatccaacatgacaccaacgcctatttcttttagctttttagttaattcctcaaagtcagacattgtgccaaagcgaggatcaattcggtaataatccgcaatgtcataaccgccatcattctgaggggataaaaaaaagggattaaaccagatcatatcaacgttaagcttcttgatgtaatcgattttagcgatgatccctggaatatcacctactccatcgccattagaatcataaaaagatttgggataaatttggtaaattacttttttgcctaaatctgtcatttttatctcctataacttaattttttgtctacgagcaaagtcaataaatttaaactttttaggattatgaaaggataaagttaactgaaacagcgttgtatctgctaaaaaattatgactagctactagtactgcttccttactatccaattgcaatttctcttgtaaatcagcatcgatttcttctaccgtaattgccttagttgcataggatatatctagccctaatttattttctaaataattgtagattgatttttctgcttcttctgacggaagctcagtaattggtggattaaataagaaatcacagtccagcacttctggttcatcgttaatcattcttaaacgttcaacatagatccctgcatgcttcttttgttcagggaagaatttcttgaaaattgccggcaaatcatcaaccatttcatcattaagtagcttagtttttgctttcattcctaatgatttatttaattccgcaaagctagaaattcctgaaataggaaatgaaaacttttccaaattaaggacgatcgaacctttgcccttgattttttggattaatcctaacgaggtcaattgctgcaaagctttacggactgtttcgcgtgacgcgccataaagctctgtcaattgattttcactaggcaagcgctcgccttccttaaattgttgatgtttaatcttagaagctaagtcttgagcgatcagttcagattttgctttagtcatcttgaccttgtcctttcttaaaatcatgttcattatatttttgatgtacgtacatgtcaatagatatatctaaaaactatattgcaggcatgtaatcattttcataaaaatctattggcaacttgtacgtacaggaatatcataataaatgaattttgtgaaaacgcttttataggaaagggagaataacacttatgaataaaaacgaaattgcattacttgctcctgctaatggtcaagtaattgcactaagtaaaacaagtgatcctatctttagcaaaggaactatgggtgatggttttggtttaacaccaactgataatacagttcttgcaccagttagcggcactatctcaatgattgctgaaacaaagcatgcgatcggaattactactaaagatggtctagaagtattggtccacatgggagttgatacggttggacttaaaggtgaaccgtttgatgtagtaattaaaaatggtcaggaagttaaagctggtgaccaaattgccacgatgaatatagagatgattaaagcaaaagatcttgatactacgattatgactttaatcaccaattcatctatgaaacttgatggcttagatgtaactgaaggtaaagcagaagctggcgatacagttgctcgagcttatttaaaggagtcaaaagaagatagttcagacaagaaactttcgtatgatgaattagctactttcattattaagaatgttggtggtaaagataatataaataacctgattcactgtatcacacgtttgcgcttttatttgaaagatgagtctaaagccaatgatgatattttaaaaaatcaacgtggcatacttgacgttatgcatgctggtggtcaatatcaagtcgtaatcggtaatgaggttaccaatgtttacgatgcagttatgaaacaattgcctggtcttagtgacaatccttcaccttaaactaataatcaggatgatggtaaaaatcctgtttctagagcctttagtaatctaattggttttattaccggctcaatgagtcctgtaatcggtgttattgcagcatcgggtatcatcaaaggcttacttgcactactcacccttccacaacttggtgctttacttagcgtcaagagtccggtctatgtcacagttagtgctatggccgactctgctttcttctttctaccagttctagtaggatttgcagccgctaagcggttaggatccgatccaatgattgctgcagtaattggcggtttcttagtttatccacaaatgattacttggggcaagagtatgacgacaatgtttagtcttggatcttggaacttccaattcttaaactattcttactctatctttccaatgattttagctgcttggctagctaaagaatgtgaacagtggttaaagaaagctttgcctagttacttgcaaatgatctttaccccattaattactatccttgtagtttcaactatcacattagttattaccggtccaatcattcaaggagccgcaaatggtatcgcagtctttattaactggctagtatctgcatctggctgggttggcggcttaataatcggtgccttttatcagttattggttatttttggtcttcactggggcgttgtgccactagttgctcaacaaattgcctcaactggtcaaagctcattaaacgcaattatctgcgcaacaatggtttcccaaggtgcagctgttcttgcagtcgcaatcaaatcaaagaaagcagacataaaagagctaggaattgcagcagctatttcagccttctgcggtgttactgaacccgctatttatggtattaacttaagatataagaaggtctttgcttcaggttgtattggctcagccttcggtggcctagttactggtttaatgcatggtactatgtatggctttaccggtggtctaattggcttctcaagctttttcaacccggcccatcctactcaactaaatagtttctatactttcctaattgccagtgctgtttcaattatagtttcatttattgcagtttgggtatggggatataatgacaacatgactatgggtaaaaaagtagccaagaagcaacgcccaggttcagctaaataaaaatttagagcaaaataaaacgatgaatcacccacaaaggtaaattcatcgttttttgtcttatttaagcagcatcagcaatccgttgtgcctcaattaattcagcttttctgatatcacgaggcaagaactgacgaatatcttcttcattatagcccacctgcatccgatggtcgtctgcaataataggtctctttaataatcctggattctgagtaattaaatcaaccattttagacaatgacaagtcttcattcaacttattctttaattgtttgaaagactgtgaacgagtagataaaatatcctcagttccattttcagttaaagacaacagatgaaggacatcttctttagataattccttaaagacgttcttttccttgaaagaaagatgatatttgttaagccatgctctcgccttacgtgaagatgcactacttgttgacatataaagagtaatcatacaatacgcctctttctaaaaaactcgttaacttctcgtacattagttctattgtataacttactttttgatagtgcaagctatttttacaaaaaaattgtagaaaatagtatacttaccttactgaaagaaggaatttgatgaattttaaaacaccaattgccgaacaaatgaggccgcaaacactggcggatatggtaggccaaagtgagttgctgggaccaggaaaggctttaagaaatattatcaagcagcatgttaatatttctttacttctctgggggcctcctggtaccggaaagacaagcttagctcaaattattgctaaagagaatgattatccctttgcttcctttaatgcttcaattgataataaagcacagttgaacaacattattaatgcttataagtatcagaccttcgttcttttaattgatgaaatccaccgtatgaccaaaaatctacaagattttttattaccttatttagaaaatggtcacgttctacttgttggctctaccactgaaaatccaattatgtcgattgtgcctgcagtgcggtcacgttgtcaaatctttgagttcaatcctctaacagaagacgatattgcagctgttttgaacaaggcatgtactaaggtccttaaattagtagatcaccaagttgaaaaaaattcgttaaatttgatagcagctgcagctgatggcgacctacgaattgctttaaacattttagagactgttcatgcacttaatcctaaaaagatcaccttagcaaatgttaaatcgtttactaagcagcaattctttagctatgataagaatgccactaaacattacgattatttagctgcatattctgactctatggctggctctgacacagatgctgcactttattatcttgctattttgctaaaaaatggagatttagcttcggttgtacggcgtctgcgtgagattccatatacttatattggcttagctaatccgcaacaagtaactcaaattgttactgcagctaatcaagctgaaaagataggaatgcctaaagctaaatatccactaatgtttgcaacaatgttaatgtgtatttcgccaaaatcaggagcatttgaggaaatttgggaaagacttgatcaagatagtgatcatcccaatcggtatcccatgcctaatagtttgcgtgactttcattataaacacgctaaagaaatcacgggagctggcctagctgagtcaccttttcaagctccgcatcaaatcgccaagcaaaattatatgcccaagggactcaaaggcaaacaatattatttcccaaaagacaatcaaaatgaacgcagattatatgagcaatacctaaaattacatcgttatatttacggcgaagattatcaaaaataaaggacagcaatgcaattgagcatccctgtcctttttggttagattataaattaattgcttctacgagagaagattctcgtccagccacctatatggtagttctatttaagttatttgttaaatgctaatcgaaaaaactttacgtactttttacgtattttattaccaataataacaaaaaagcagcggcgcaaatacagcgtcactgcaatatgtagcaagattatcaatgaagaaaatggtatttatcacttctaaggaggaaggatatttcatctagccacttatatcctaatgctacagtattaatttgttaaataaaacggctattaaatctaccaatatttttctagtggcttttcattcctaccagtgcgagtttgacgcaaatgttcagtcacaatattagtcaacacttcggctaatttatcaatctgctcaacagtcacatattcgtatcggccatgataattgccaccaccattaaataagttaggtgtaggaattcctttaggcgaaataaagtttccatcagttcacctctaaaggattgtacatttggctttagtccagacttgcgataagcatcaagagccagatttacaatatatggcttgtccttaatatagttgtagatattttcatattgctcacgaatatttacagtaaatctattgccatactttttgttcatctttttaactagatcgcgaataaactgttctttacggttatattcactttgatcaaaatcacgaataatcatgctaatatcggcatgatcaacattgctttgagcatgtagaaccaagaaataaccatcatgattacgtgacttttcaggcacttgatcctgaggtaaattagacaaaaaatcattcatcaaagttgttgcgttaaccatcagaccatatgcttcaccggggtgaactacagtccctctaatatggatcgtaacctctgacgcattaaaggtatcgtattcaaaatctcctggccgcccattgtctaacgtataagcgaattctacattaggaaaatcagctggatcaaaatattgaccaccacagccaatttcttcgtctggaccaaaagcaacaaaaacatcaccgtgttcaatttcaggatgttcagttaaatatttaagcattgctaatgccccagtgattccagccttatcatcaactcctagcaaagtatgaccatcagaagtaattaaggtttgtccttttagatttaataagtctggaaactcagttggatcaagaacaatattatctttctcatctaggataattttctgaccatcataattttcgtgaatttgtggcttaatattaactgcgttaaagtctgcagtatccacgtgagcaaagaagccaataggcgttaccttttctgctgtgtttgcacttaactttccaattgcaaaagctgttttttcattatagtaagcatcaagcccaagctctttcatttcctttactagttccttggccagctcaacttggccaggtgaggaaggaatctgatcatgatgttcataatatgagcgagtattctttttagctaactgaataaaccgtttttcttcataatctaaattataaaaactcattaatattgcctcttacactaattccatcgtatcacttgaaactggctcagacttggggtctgaccaccacggctctttaactgttttgataattttaaaaccatgctttgcatacagcggtttagctgctatatttgcgctaaagacttctagcctaatcggccgtctaatatttggtaacactgaagctagcaattgatcaccaataccacgtcgttgaaattgaggatcaatataaaaataagctaaattatgtggcttatacgcagcaaagccagcaaattcattattaacttctacaatcctaatctcagaatcaaagaaattataccagtatggtgcttccttaaacggaataaaatatttctccactccgcctattttcatttcttgcaaacgagccgcatcatgaacccggcacaaatcttcgtaatctaaactttgaaaacatctagttcttacttgcataatttactcctttaggtgaaagagttaataaatttttattttttctttaattatacagaagtgaattatacatttaaagattttagttccaattcaaccagtcttcatcaaaaaacttaactttttcttcctgtgattctaattcctcttgttgcatcatagctattatcatctcatctttctattttcagaccattagttcgcatagaaattatatcaaacaaaggttcatctttctactctttttcaaaaaaatattaattgagctagtaatagatgtgaattacctatatttttatccacaatcgcgataatatcgggcttcagagccatgtttcacgtttattgtttacatttagctgtttttccaagtaatcaaatagcttttcaccttataaaaattgtttcataaaaaaggatccaacttaatggatcccttaaacatgttattcgtaaataattacaggttcgccctttttaatattgttccaaacgcttcgaatctcgcttggcttaacattaacacaaccatgtgaaccaccttttagataagcggtcttgctccaatcagtccgccaagaggcatcgtgaaaaccacagccacttaaggtaaatggcatccaatacttaactggagaagcataacttgaaccatcatcattggtcccccgcaatgtacttggtgattccttatagtggatataccacaccccacgcggagtttgatcacccttagaaccttccatagtaccggtaaccacatcacgaagatgaacggctagtttaccctttttgatcaaccatacctcttgctttttcaatgatacaacagcataagtatcaccaatttctttatttgaatagccatagccgtgaggataagtgctgtagcctaaaccgtaaagtgcatctgcaccatcaaagtttttttggcctttggcaaatgcttcgagaagtaagcgttgcgtctttttaacataaacgccccaaccccaagtcttattctttaccgttatcgttttgcctttaactttattgccctttggcactgtaaatttatagctcttgtgtaatgttgaaacttctttatcaatttgatttaacttagtcgttaatttactagtatcaccaaattgatagcgattatctcgataagtcacattattcaataaatctttggcctttaattgataatttttgccattaattttataagtaatctctgctttgcttaagtcagttagtttctttttagctgtagctaaattactagtagtaaacttataagtctgagtcgatggagttttagtttgttgcttcttaaaaaaggcctttgtctcgggctcatctaatgattggactgtagtgttatagctataaaccagttcgttattttttaactcaacttgatttttagctttttggttaactttagccattgccttagtaacggttagctttcctactttaactccatcgattgtaacattagggttaaagtgagttttagcatatttttctgctgcagcttgtgttgccacacggtgattatgaatgccaaaacccgcgattactccaacgataattaaaactgcaatcgttaaaataataatattgtttcgtttattctttttctttaggtcttcgttcatactatcctaccttttatgccagtaataatatctttaatatagcaccttgcaaatttcgtgtaaaatctattgatttatctaaccttttttataattagacgactagcatcccgcaaagcaaaatataaaattggtgtacaaattgcagtagaaattgaattgattacagttgcaggcaaactaacaaaggctccaactaacgctactttaaagctcgtccccaccattaaagcttcaacaatcgaaacgcaataagtagtgaatatcttagttacccctgcaataatacctaaaataataatatttcttttactatcttgatagtgcattcctcgataaactgctgtcaaaaccgaagccactactactacctcaagcatagttaaccatgatgttgcggcatagccatttaacaaatcaaaaccacctagaccaataattcccgcaatcatgccattacgataacctaaatataaaattgctacagcagttagcgtatttccaaaatgaataaatgggcgtcctaccatagcaggaacggggattcttaacacccagatcccaatataaataattgccgcaaaaagtcccgttaaaactaaagcttgtaaagaattcttgttttctctaaatatctgcattattaattattactccatctcttcagtaaatctgataaagctgctgcataatttggtcctagacgtgaatcttgcttgggtgtttccctgattgcttgtgcaacaaaatcggccgcaattgaacacgctttttctaaattttctttatgcattacagcagcaaaaaatgcacttgcaaacaaatctcccgtaccaaaataattacctgggagttttttctgaattaaagaccaactatgatcggctgtaattccaacttccgcaattttttccttattaagtgaaataccggtaattatgacattcgggacaccaaattgactagataattcagccgcaaattctgttgctgttttcaatgaattactagttgcctttttgcctaataaaaatgctgcctccgtcatattcggcgttaaaatcgtagccgacttaactagatttcgcatctttattacatagttttcatcaatgccacgataaagttcaccgtgatcacccattactggatcaatcaagatcaatttatttttttgtttaaaatagctaatcttttctgtccaaaaatctaatgcacttttgcccaaatagcctaagtatacagctgaaaaatcaaaaccaaccttttgccaatgggccataatcttagccatttcattattcaaacttaaaaaagtattctcaccaaagccacccgtgtgtgtagacaaaattgcagtaggcaatacggtcgggctcaagccacatgctcctaaaacaggtaaagctgcactaagtgatacttgaccagcacaagataaatcttggctaactaatacgccaccattaaccatcttttttactccaatcaaaaaaatcctgctttaagcttaacatgaagtttaaagcaggaaaaattttattttgcgctaaatgtattagccttgatatgattcaaaatttgataaccaatttgtttatttctgttttcatcattttgagtttgatttaagaacataatcaaaccattttgattatctgtagtcatctgaatccagttaccaaagtgagtgttatataagttaccatatgctaacttcaagttatcattattcttcatatataaaccacctgaataaccatttgatgaacgtgatgttaaatgagtcatataatcaaagtctgttcgactcaaaatttgcccattggttaaaccaagttgaatacggtaatagtccattggagctgagaacaaattaccagcacctaccaattgagaagcttgagtctttttaacatattgagcccattggtaattcttttgattccaggtatatgagataccatccgtcatcccggctggaatatcttccaagaaataagttcgctttaagccaagcttattaataattcgttcctgcacattttgcttgtagctttgtccagtttcttgacgtataattccagctaacaaaatatagttggtattattgtatgaaaaattaccaggttgattttgcgtagttgagtttagcttattaacaacccaattaattgcatcagcttctgaataaacacgtcctctatttacttcagtatcagctgctgtcaatccagaagtatgcgtcatcaagttgccgacggtaatattatcagcaccttttaaattaggataccacttagagatcttagtatactgtgtaaacttccctgcagaaattaattgggtgataattgcgccggtaattactttttgcaaagaacaaacaggataaactaccttactatttcccgcacctaatcgcttgccataataaccgtaaccataagaaatttgttgtggttgtccatcttttactataactacggtaccacgagcataataactagctaatgtatttctaacaaagctccgcatttcagttttgttataacttgctgcctgaactgtcgagctattggcattagcaattgccattccaacaggcattgaagcagctatagttaacgaaatggttgatttgattaatgtttttttaaaattaatacgtttcgttttaaattcccccagcaatgttatgtaaattctacccataatactagcatttatttttttcattggggttacaattttgataaagaatcaatgagaacgtatacattttctttttctaatatggataattatttaaatgatcttgatcagtaatctgacgtattactttagccggtacccctagtgccaatgaattatctggaatatctttagtaactaccgatccagctccaataacgcaatttttaccaatttttacgccgggacaaacagtaacattgctggctaaccaacaattatcgccaacagtgatagctgctccatattcaatatcggctatttttccgtctgattgcttgcgagcatttctttgagttggcaacaaaggatgcaatggagtcgcaaatgttacgttaggtccacacattacattatttccaattgttacgggacaagtatccaaaatagtcaaattgaaattagaataaaaattatctcctaagtgtgtaaattggccataatccacttcaattggtccttgtaaatatacattttgaccatgattcggaaaaagacgatcgataattgctttccgttctacctcatcttcatcagtagtcatgttgtaatcacgtgataagcgatgagctaaactggaaatctttttcagttcttcagtatctgggcgatatggtttgcctgccaacatttttttagtattttcttccatcgataaagcctactttctaatttaatcgcttacttaaataaatcatgtctagtagctgatgtccagcttcaaaaatcggatgatcataattttttacaaaaaaatctttgatcttacctgagcgtttaaaaccacatttttcataaaaaggaatagttaaggggctatcacccgttccaacttgcaaaatttgatatttattttgatacttcttagcaataaaattaatcaaatgtttagcataccctttaccttgatcttctggataagtggctatattttttatttctactgtattaccattttcaaccgtaataacacattcagatctaacttttcctttatcaatcaagatatacataattccacgttctaaatagcgatcaatcatactctcttgttcatcagctaacaaaagtaagtctatatactgcttcttattagattttatctctttaatttccatgattattttccaattaatttaaaatttttctctttctactcatattctatgataaactcattattgttataaaaataagtataaacgaggaaaaaatgcgcaaaaaaaatatttattctatttgtatcggattaccgatctttttgattcttgcattctctattatggctcatgcaagttgggttaccggctttgacaatttctttgaaggcttagtccacagtattcctaatctgcagagcattatgcatgtaattacatttttagcagatactaaagttgacttagtttggatgctgttgatagctgtcattctttggctgaaaaagcagcgtcctctttcggcaagtattgtcatttcactagttacagctgatgcttttggttggattgttaaacatataatccaacgggcacgaccaactgctcacttagctgctgatgatggcttcagttttcctagtggccacacattaggaatggcgatcattgttttctggctaatactaatattgattccagctttagttaaaaataaaactgctaaaatctggctcactgttttattagctatttggcttgttttagtaatgatttcaagagtttatctctacgctcactggccaagtgatgtttgcggctcagttgctataggcttaatgtggattggcttagtagatgcaatttgggataaagttactccacaaacagacaaaaataatttttaagattaaaaatagtcgacgataagtcggctatttattttgggcaaaaagaaaaagtcactaaggaaaatgtccttaatggcttttctacaccttcaaatttcttcctatcagcagatgtcataagaaacatcttgcttagccttttcatcctcggagcgctcatcacacgctccgctactataatatcaaataaaaataaaaagataaagatttttacttgataaatttcaaaaaaagtatatgaatttttaaaaatcaaatttgtatattgctatcatttttaaccttttttagctctgatttaactgatttgcttttagtattgttaattgtcttaaaaaaggcggaaatttggccaatttctttttcggtagtcgaacaacagccacctattattctagcaccatgttcataccactcttgacttaactttttaaaatcgaattttgcattaaatggaatccaattgcgctcaaattcgttataaacgccacccaagttaggataaatgacaatttgtttatcagtaaaatcatgaattttatcaattactgcagttgctaaaaatggtttaaagcaattggctccaatcgcaaatacttgatcatattcattaagcttttgcactacccgctttaaaggagtgccatcactaattttagttgtatcatgcaatgtaaaacttacatacactggaatttccggagcattttcctttaaccaatctaagattgctacaacttcatccaatttaggctgagtttcaagtgcgagacaatcaggtttatttgccaataaaatcttcaatcgtggtaaatgaaaattaagatattcctccgttgttagagaataatctccgcgaaattcatccccttgagctaaatatgcaccataaggtcctactgaagccgctacataattatgaattcccgttgtctttgcaaaatcatcacgggcttttttggcaatttgaactgcattagtaatcaatttagtagcctggtcttgtgtaaaaccatgtttttcaaaagctgggatatttgcttgataagtatcagtaattgccatctgggctccagccttaaaataattcatatgtacttgataaatttgagcaagattatgttctaatgcaattgctgtccaaagttcattatttgtatcaatgcctaacttttcaagagctgtagacattgcaccatctaagattaatcctcgatcacggatctgtttgagcaaattcatttttctcaccttagtataaattgagtagatagttaatatacagttaatttatatttaatattacattaatcttagatctgtttcaaatattatttcttcctatgtcttattttttagctacagtttgctataaatttatttaatgctattttcatataatattaaaatagattttcgaaatcatgtaaataattggccaaatagtgtgccgttaaactttcaggcttttgctttaattctaaaggcttaccctcttggacaatccgaccaccgtttttaccaccacgtgggcctaaatcaatcatgtaatcacaattgacaattaaatttaaatcatgagtgattgtaataatggtagctccctgatctaacaacttttgcattacttggaccagaaccttcacgtcaagaggatgcaagccaatcgtaggttcatcgaaaacaaacaatgtatcattttgtttatgactaagatgagtaacaagtttaaggcgctgagcttctccacctgacaaagttggtgtatcttctcccaaatgtaagtaatccaagcctacttcttttaacaattttagctctcgttcaatcttaggcactttaacaaaaatcggtagagcttcattaacatctagatttaggacatcaacaattgacagatcatgccacttcaccttttgtacatcttgattataacgatcaccatgacaggttggacagacttgttgcatatctggtaaaaattggatatcaagagtcacaattcctgtaccaccacaagtaggacaagctccttgtttattattatatgaaaaccaacttggcgtataatgcttctttttagcgagtggctgactagcatataactttcgtaaattgtccataattgaagtataagttgctacagttgaccgagtacttttaccaattggagatgcatcaacacttactacatttgaaattgggctagaaaagctactaatttgttttggcaatttttcacttttgctttttgctataatagcgggcactaaactatccaaaatcaaactagttttaccggcacctgaaaaaccagttactgcagttaattggtttagtgggattttagtttttacatcatgtaaattaaaatattgctttacttcaaatgaaatagaatcggaatttatttgattggctggctctctggcaagtagcttagcactgccatccaaatatggtcgaattaaagaatgctgatcatgtttgattgcagtaattgaaccttgatccaaaatctgaccaccttttttacctgaacctggtccaatctcaattacctcatcagctgctttaataatgtcaacattatgatcaacaactactaatgaattgccctgagcaactaattttcgtaaaaccttaattaatcctgcaacattagcaggatggagaccaatagaaggctcatccaagacatataaaactccagtagtttcagtacgtaatgttcttgctaattgaattcgttgcaattcacctgtcgataaggtatttccacttctagccatagtcaaatagtctagccctaagtctaataatggttgcaaattatccaaaaactcctgaataatcgaatgagccattttatgcatattagttggtaaagttgcttgcacatctttaacccaggtaactaaatcacctaactgcatttcggccacctgattaatattttgcttaccgatcagctgttgtaacaattctggtttcaaacgactaccatgacaaagtggacaagtcgaataagtaaagaattcggctattcttttttgcgcacgttctgatttgctgctctttgctgagcggtaaacggcttgccgagcattttcatataaggcattaaaatcatgaaataccctgccagttcctgataaaaagtccattttatatttcttttcaggaccatttaagacaaaatctttttctttatcagtaagatctttataaggaatgtcgatcctaacaccagcatgctctgcaacgttaggcataaagttccgtcctggcaagctccaagatgcaactgcaccatctttaattgacaaattttcatccgtaatcagtttagattcatctagttgccgtaccttaccagttccaccacactcagtacatgcaccatctgaattaaaagcaaattgttcggcacttggtgcataaaattttacaccacagactggacaagttaattgtcccatttgctcacctgacatactcattgcctttgcaattgccaaactcggcttcaagcggtgtccattaggacaaactggagaacccaaacgagagaaaattaagcgtaaaacattaaaagtctcactcatggttcctactgtagctcgctcatttggtacacttggacgctgccgtaaagctaatgcggagggaatatgtttgacgctagttacatcaacctgatttccctgtttaattcgcctacgcatataagttgacagagcatcaagatagcgtcttgaaccttcttcataaagaatccccattgctagtgatgattttcctgagcctgacagtcctgaaattgctacaaatttattcaaaggaatgtcaacgtcaatattctttaagttatgtactcgtccgccatgaacttcaattttcgttggaatcgtcattaaatattccctttccatatttagtcattatctattttaatctataatcatgaattaccaacaagcaaaccaatttttggaaaattatgacaaaattactattaaaaatatgtgttatatgatatattataagtagataaagtaagcgcttacttttaaaagacatagaaatgaggtgttgttgtgatattgattaaagaaaccgttgttttttcttttgatagatataaaaataccacatatttagaaacacctatcaagctaggagtcatgcgtaacggcgcttgattcgtgtcctaaataaaaaatgagggttacattttgtaactcttatttttgttcttaaaatacaaaaaaaatcagtacaaaacacggagtttgtactgatttttaatattctaaaggttaattatttaacccaatcgcggacttcactatcatcacgtgcaacaccaacaacattcagacctttagcccattctttaaagtgactgacataagccttatggttagtgcctgctgaggtaaagaatgatgcaacttcaccacggtagtttttcatcttttcaagtaatggcttaattggagttgcaggatagcctgaccaaacagggctaccgactaaaatcaaatcataattattaaaatcgatatcatccatttgaatttcaggataaggaatcttaccttgaatttgatctagagcaatatcgttggtcttgtacatatctgaatcaaaagcgtcaggagcaacagttacttcctttaattcgctgttttcaatttcgccgttaatcttttcagccatgttcttggtattgccttcccaagaataatagataattaatgtttttttagccataaatatagtccttctttcatttacatttattgtaataaaaaaagaccggtttgaccaatattttaatattattattttagctattttccttttcttttgattatttccatcatagcctgaccatactttttcatcttcgcttgccctacaccacttacctctaaaaattcactttcattttgtggtttaatttgtgccatatcgtgcaaagagcgatctgaaaaaatcataaatgctggtactttttgctgcttagctaattccaaacgcttttgtcttaaagcttcaaataaagtatcactttcttcaccagcatgagtagtagttactgaaatcttagcaattcgccgtttgactacagttttgccatctagtacatcccacccatgattagttacatgcactagtggatatttgctaccttcaacttctagataacctgaagcaattaaatagtcaatcaagcttatagcatctttttgcttcattcttagagagccaaaagacttatattgtgtagcattcatttcttgcatgcgctgattttttgagccaatcaaacattgagcaactatcgtttttccaaagcgaccatctagttcataaaccatactaatcactttttgagcatcaatggtaatgtcagtcaatttatcctgatttagacaatttgagcatttgccacatggcggacaatcttgaccaaaataacggacgataaattgctgcaaacattcaccagtattagcataatcagtaattgtttgcaacttacgatattgcagttctcgatatttatcatccgcatctgattcatcaataaagtagcgatattgacgcaagtcaccaggatgatagattaaaatcgcttcgctttcttccccatcacggcctgcccgacctgcttcttgatagtaactttccatattacgggcacttgaggcatgaatcacaaatctgacattacttttatcgatccccattccaaaagcattagttgcaacaattacttgaaattcatcaaattgaaaagcttcctgtacttgacttcgttctgaagaatccattccaccatgataagcaccaacagagattcctttcttagccaaataatctgtcaaactttcaacttttttacgtgtattagtgtaaataatccctgctttatcctgatgtgccttaatatattctgaaatatataatggagtattttgtggtgagttgaccactttaaacgatatattagggcgagcaaaagaggtaacaatcatattctccttgggaatattcaattgttcacaaatatcatcttgaaccgcaggcgtggctgtcgctgttaaagctaatatatttggtctgctttttagtgaattgattccatctaataattgacgataagcaggtcgaaaatcatgtccccattgtgaaatacagtgtgcttcatcgacagcaactagatcaatatctaaaaaatttaactgatatctaaaataatcaatcgctaaacgctcaggtgtaatataaattaacttaattttgcctttatatgcctgacgtaaaattggattaacctcttcttgcggtgtagtagaatttaatgctgccgcattaattccattttgctttaaattatcaatttgatctttcattaaagaaattaatggtgaaataaccaaagttacaccggaattaatcaaagctggtatttgataacacattgattttccgccaccggttggcataaccgctaacacattttgcttttttaaaactaaatcaattacttgtttttgacctgggcgaaaatttgtatagccaaatatatcttttaaaacttcttctggattcataaacttatcctaactagttaaattgctactttttattctaaattaacaatttaccccaaacaagataaaaagattcacacttttaaataaagaaaaatgtgaatcttttagagttaaatttacttataaaatgtttcttctactgcatgagtaatcgcaatcttatcatgagcataggacaaaccgccttgaatataaagcatgtatggttcacgtaaagggccatcagaagaaagctcaattgttgatccttcaacaaaacttcccgaagccataacaacttcatcttcgtaaccatcctgatgatatggaattgggtcaacaaaagagttcataggtgaataatgttgaatagccgcacagaattttaccatcggatccggctcaccaaaagtaacagtttgaacaatatcactacgtggatcactccatttaggtgaaacctgcatccccatttcttctaataaggctgcagtaaagaccatacctttttgagcttcaccagtagtatgagctgccataaagaatccttggtagatatcgcgcaaataaccccaagttgcgccttcaccttttccagctcctggcactgtcaaccgtgaaccagcaccatcaattaagtcttgtcgcccaactaagaaagctcccccttttactagacctgcaccagcattcttataaagggaaccagccatcatatcagcaccataaaaagttggttcttcacattcagagaattctccataacaattatcaataaaaatattaacatctggacgaacttctttaatgaacttaagcattggcttaatcttagccatagtaaaagtcttacgagttgcatagcctaatgatctttgaattgccactactttaattgaaggatccatgatatcttttttagcttgatcataatcaacctcgccgtcttttaattctgtagtcttaaacttgatgccccattccttcatgttgcctggtttattgccagctaagccaataacttcttgaatagtatcatatggcgtacccgtcaaataataaagcgtgtcaccaggacgaagcatactaaataaaccaacagtaattgcatgagtacctgaaccaaattgtggacgaactagagcatcatctgttttaaaatagtcagcatatatatcttcaatcttatcacgacctatatcgtcgtagccgtagcctgttgatggaactagatcttcttcaccaacatgatgttttctaaataggtccaatacacgttgttgattatacaaaacttgttcatcaatttcttctagacgaggttgaatcattgattcaactttagtcactttatcgcttaactcttttggtaaattctctttccaagaaaaactcatttttaactccctatttatttttgattacttctgcttgtacgcataaactaccattattattttcgctcagatatactccctgaatctctggcacaaaaccaggaaacttttcaatagcatgcgccaagacttcaaagtacttttggtctactactccccatttttcaccaggtgcaacaatgaaaactcctggtggatacggcaaagctccttcggcagcaattcttccaacaacattttctaggttgaccagttcattttgatcctttttaaaaagctgatcagctgtagctggtgtcatttgatagtcttgcatccctgatttagaaaatagcttttgctgtaatacaaaagtattattttcctgatagtactcatgcatctcttgacacaactgtttcagggtatagccttgataacgctttggatactcattatataaaaccggcaaaacatctttcattaagtcatcttctagatagtgtttttcaaaacttaaaaaagcttcaagtaaagtatctagttctgcttgactatctcccggtgtaagtaaaaacaacaatgaattcaaatcatttttagctcgaataatatgattttccattaagtattctgccactaccgcgcctggaatacccgttttctcatacttttcattttttacatcaatcccgggagtttttaccgtaatcttcaatgggtcaatcattgcttcgcctggaaccattttacggaaaccgtgccaatccgtattttgtcccatttcccaatattctgcattggtagccaattcatcagtcgaaatttcggcaaaattgtcaggaactaatggcttaaatagcttagactttttgagtagttttttccgccattcaattcccattcgcagagtttgatcccaccactttttatttcctgctccagcagtaacgtaggaattaactgttaatgaagcataaagtgggtatgcataactggaagtaacaaacttcagataagcatgattaaagtgcttatgatcaacatatcgtttttgtcctttaatatgagcatccttttttagaatctgtgacgcttgagccatacctgcttgctgtttatgtaatgactgagtaaccaaaatacctggatcatcaggacccaagttaagtagaagtggtgataaatgtctcataattggtacgaattcttcaaagccgccccaggcacagtcaaacagaacataatcacaaagtttaccgattcggtcaataatccattgtgcatcataaaagactccatcataggtttctgcttgtacgattgctaacctaaatggccgcttagcctttgcctttgccggatctatcttagctacttcagctctaattttatcttcagttaagaaggctggatccatttctccaattagtccaagtgcatttcgatcagttggaatgtagaccggctttgctccgctcattaccaaggcagaattatacaaagatttatgattatttcgatcaaataaaactagatcgccttcagataaaagtgcacttgcgcaaatagaattagctgaagtcgttccgttggtacagaagtaaaccttatctgcatgataagttttagcagctttcttttctgcattaagtggcgttccagcatgcgtcattgtatcccctaattgaggaacagtatcacttgtatcggcaaacattagatttttaccaaagaacttattaaaaactactccggcaggatgtttgtcataatattgcccattatggtgacccggtgtagtaaatgaaattggttttgcttgagcaaaattgatcaagtcggtcaaaaagcctggcaccatttgcttttcatattctgtagctttctgagtgacttggtcttcatctacctgatcagttactttaatcaatggaatcggaaagccagattgttctcttagagcttctgcttgttttattcctaatgcatcatcatttttgacaacaattgcggcaagttcagcactattttgtacatcgccaattggaattgacgaccaacctttcatcttattaacattgacgccatttccaatggcaattttcaaaaaatccatcctttttctttccattttgtccacgaaaccgttttacatattgcaaaactttaaaaagtctttataatttttctacagtatagcgtactttttgcattctttcttaaaatacgctacagctgaaattattatataaatattggaggtttttaacaagtgcatttgccttgctcgcctccgagaacagctatgtcaacacaacaataaaatagcttaacttggaggaatttttatgtcagaaacaatcgaaacagtcaatttcgaacccggcaaaaaacactacatgtcatggccggttattgcattgatcgacttcgtaacgattatcagttttgaaaatattttttatccatttcaaaatcaaggcttatcagtagttgtatcttggattttcctactcttcgcctacgttattccttatgcattgatgtctagtcaaatgggcctaacctttactgatcaagccggtggattggcatcttgggtacgtcattcatctaacgatacactgggctactggacttcatggatgtattgggttcaaactgttccttatttggtcgatgtttctaattcagttattgtgtccttttcatggattattttgggcaacaatactttagacaagcatatgtctactttttggtttgggattttgacctttgtcattattcttgcctttattttggttgaaaatgcaatcaagaattcacttgaactactatctttaattggtggtggtgcaatgtttattatgtctatgctctttgttttacttgctgtttggtcagttatgcatggacaccatattgctacccaaccatttaacttggccgcatttaagccatcatttagtttacgttacttttctaccactggtcttctaatcttcgccatgtctggtgcagaacttgctgctccttatatcgtacaaatgcgcgatccaaaacacgaatttcctaaagcaatgtggatgttggctttgatgactggattcttgactatcttcggtactttggctttagcaatgtttttcaatgctcatcatattccacatgatttcaagatgaacggaccttactatgcatttcaactactaggcgaaagccttggttggggcaaagtattaatgtacatctttgctgttgttcaagccctctttatgatggcccaattagcagttttacttgatgcatcaagtcgtgtctttgccggtgacgttgccgacaaattcatgccaaaatggttaactgggaaaaaagacaaaacaggtcgtccagttcactcgtacactttaacttgtggtttagccttattcttgcttttacttactgggactttgccaaatattaattcaatttacaattggcttttaaatatcaatggtattatttccccatacaagacttgttgggtattcttcgctttcattatgttacggatgcaccaagagaagttccactcagattatgtcttcattaaaaataagactggtgcccttatcatgggctggtggtgcttaatctttacctttatctgtgctactttaggatttattcctcaagaagcagaagcaacattcggtagcgcagcctttaatcaccaattaattatgaatattattacagttatcgtactctttggcttaggcttcttactaccatacttaagaaaacgcgaagaacgtaaagaaatgaatatataaaataaacatgcttcgatcagttcgaaaatcgaggcatgtttattttattattctaagatttcaacctgcatcttactaggaacattaacaaagtcgaattgtttttgaaaaacatgatcaaaccgtaaatcataaacagaaccaataattggtgttaatgcaaaagctcgtaaagtgttcatatctttagttttattagcataaatatgatgcattggtggtttgattttataaattcgttctaaatattgtggacttacctcatcaacatagccttctagagtgaaaccaatgctagtgagagtttctcttccgcgcaaagcggtaattgaaactttattgtgtcccttaatatggcgataaaatgacttctgattagtcgttgcaaaaatcagacgaccatcttcattaaagtcaatatcgataatattggtatgtggatcaccattttgatcaacggtaccaaaaattactgaatggaaacaatcaacgattagatctaggaattcgtcgttacttaaattgcgatcgagttcaggaacatgttgtctcataataatctttccgtttctatatactttctgtaatttttatctatattatttcttatagtgtacatgacacgattaactaaaaacaactttaatgctcattattttcccattttaaatgtataattgtttaatattaatttttctggtaaaatttcagctaacaaaaaataagaaaagaggcagaatatgaatttagactataagaaattggcccaagccaaaaaggacgacattcttcgtgatcttgacgaattaatcgcaatcgactcatctgaggatttgaataatacttccgaagagtatcctgttggtccaggtccagttaaagcaatgaagaaattcttatcgtttgcacagcgtgatggtttccatatcaaaaatgttgacaagtacgctggccgtgtcgactatggtactggtgaaaaacgtttaggcattattggccacatggacgtggttccagctggtgacggctgggtaactgatccttttaaaatgttaattaaggatggtaaaatcattggtcgaggttctgccgatgataaaggtcctgccctagctgcatattatggcatgcttttacttaaagaagctggatttgaacctaagaaaaagattgattttattgtgggaaccaatgaggaaactaattgggttggcattgattactacctaaaacatgagccaacccctgatcaagtattctcacctgatgccgaatttccaattatcaacggtgaacaagggatctataccctgaccatgacctttaaagatgacaataaaaagggatcagtaatccttaagtcattcaaggccggcattgccgaaaacgtaactcctcaaaaggcctatgcaactattgttggtagtgatttagccacaatgaaggaaaaatatactaagtttttatcagataataaacttgaaggcgaattcactattgagggcgatgaagctaagattgaattaactggtcaaggtgcccatgcatctgcacctcaagttggtagaaatgcggctacatttttggcagtatttctagatcaatttgattttgctggtcgcgataaaagctggcttcatttcttagccgatgttgaacatgaagactttaacggcaaaaaattaggcgttgctcatcatgatgacttgatgggtgatctctcaagtgctccatcaatgtttgactacgaggaaaatggaaatgctgttttgaaagataatattcgctatcctcaaggtactgatccagataagatggttaatcaagttgaagaaaaatttggtgatatcttaattccaagttttgcttcatttgaagaacctcattatgtacctggagacgatccattagttcaaaccttgctcaaagtttatgaacgccagactggtaataaaggtcatgaagtcgtgatcggcggtgggacttatgggcgtttatttaagcatggagttgcatatggcgctcaacctgaagatgctccaatggttatgcaccaagcaaatgaatatatgaaggtagatgacctaattaattcaattgcgatttatgccgaagctatctatgaattgactaaggacgccgaataaaaatttttacatgtatcaaaaaagcttatatactgatcttgttttaatgcagtatataagctatagaaagttgctagtgtcatatatcactagtgacttttttatttttccaataaaacttcttcattatttttcttagattttagccaaaaatgatgtcccaagtaacaaatagctacaaaaggaattgtatagtacaatgctactctttgggttggatcgaaccagattaatacacaagaaagcaggcttgatataaatgcaaaatatggaattacaggataccatggggtcttgtacttcaattcactgagttgatgacctgagtttaaaaatgcccttctaaacttcaattctgaccatgcaatcgccgtccaaacgaatacaacagctaatccagaaatagaaactaatactagataaaccgtcgaggcagcaactttactagaaatcaaagcaaaaattccgtctaacatacttactactaatgacaatactggaataccacgcttattagttttggtgaatgctttaggaattgttccttcgttgcccaacgaccaaagcattttagttgaagcatacaaacctgaattggccgcagaaataattgcagtcaaaactacgaagttcataatatttgcagcaaatggcacatgaattaggtcaagcacatacacaaatgggctttgagttactccagccgtatgataaggaattaatgcggccataactacaattgagccaataaagaagataattaaacgccaaagtgttgtcctgattgcttcaggaatagctttctgaggattctctgcttcaccagccgtaatgccaataagctcagttcctgaaaaagcaaagtttactgttagcattgttgtaaatactccaccccagccgttggggaaccagccatttttataaaaattaaccaatcccaatgtgcttgataaactttgctcaactgatcaatcaaagctgttgcggtccataatttattattagtatctacgccttgtttttccaattcatacgacattgcaccatctaggactaatcccctatttttaatctgttcaagcaaacccatttttttcatgctgtcaacattattttagtaaatttcctaaataatagccgcaataaactagaaccaagccacccagatatgatgacaccgcgtagaatacaagaccacgataatttttactcttataaagctcaactaattctgtattcatagtggaaaaggttgtatagccacccattactccagttcctagtaatgcataaataaaagtgttagcaccaattccaaaaatcaagcctaaaattagtactccagttaagttaataaacaaagtcggtgtaggtaaattagaaaatttattaccaatccattcccaatgctttttaccataattagtaatagcataacgaagcatagctccaattgatgcaccaattcctgcaagcaaaaaattcatcgtgtattcctttcctttcttactaattgaccaacttttttaccaattttcattcctaacatagcaaaaaaaaagccaaaaataattgagctaaagtaataaattactgcttcgattggcaaattagcctgcatattttttaaaacatcaagattaaaagttgaaaaagtagtaaatgcacctacaaagccagtacctaatccaactacaagccactgcctaatctctttagtttcaataaaaaagtaggtgaaaaacgctaataaaaagcaacctatgacattaccccaaaaagtaccataatagctgaagtttgcatttaaaccagcacgtgccataccaccaaaaaaggcgaaaatagcgatactaatgtaattaataaattttgaattcaaacagattcctcccacaaaaaaacgtctactttacccctatcggataaagtagacgtcattagattttactcggttaatggcgaacgtcatcgcctattcagttgacagttatcatcatacgacttttctgtttggttggcaagttgtattgtgtgcgtgtcgcaaagcgacacgcagtttgattatttaataaaaaaatttagtaacaacgtgcttgaaataatgtataattatttttaacgaatgtttgaaaggagcctcaatcttgacttttccatatgaagataaatttcgcatttactgtaaacaacaaaagaaactagccgattcaactatttctctagcctgttcttcaatttcaactttttgggattattattctggtagtttagatgctactgaagcaaatgtagaaaatgttacaactggagatatacgtaactttttagattcacttgaaaataaactccatatgaaaagtaatacagtaaataaatatcttagtcacataaagatgtattttgtttttttgaatgaatatggctacatcattacttatccattgctcactttacgtggtaatcgcttcaatcgtaagcaacactatgttattggctgggaaaatcatttatcagaattaattcaaataaaaaatattcatcctgaaactatcaagatgatggctgctattgcttgtggttttaagccaaaagaaattatgattttgcatgtaaatgaattgttggtaaaagttaaagaaaatgatgtcagagaatatatccaaaatcacactaattttgccaataacgataatccctatctgtttgctcgccgcgatggcaaacattacgcttctgattttaatattaacccaaaaattgcccctgaccgttcaatagtcggcatgccattaactacacataagcttcggatgtcttatgtctactctgttttgtctaattcaaaattaagagaagcggattatattgaaaaattacatctttcaatgaaaactttaaattactatcgtaaaaatatgacactctatgtagaaaccagtaaatttgaattaaaaaaataaacaagcaaaaacgactacccattttgatatagtcctactttagtagacagtacaaatatataaaattgtactatctatgaaagcaggactttttgtatgtctagaaaaagtaaatttagctatgaagctaagcttaaagcagttaaacaatacataagtggcgaagcatcacctgcttcaattgcgaaagttttaggggctggcaagactacactgcgccaatgggtatatgcatttaaagatcatgggccagaagcattaagaccacataaatataatcaaagatacagtaaagattttaaactcaaatgcatagctgcctatttaaatggcgaaggctcatatgattatctaacaaataagtttggtttgcgaagtgctgcacagttaaagcagtgggttatcaagtataatagtcatcaagaactcaaggactacaatcctattctggaggcttatatgactaagagaaaaaagacaaccctagaagaacgtaaacagatagtgaaatactgcaaggatcatcaatggaactacaaggaagcagctcttaaatttggctgcagctatgcccaagtatacaactggtcaaaaaaatacagcgcaaagggaactgacggcttagcagataggcgcggtcatcgtttaaaagaagctgagctatctgaaactcaaaggctaaagcgtgaaattgaacagcttaaaaaagaaaatgatattaaagaccaagagatagccttcctaaaaaaagtgaaggaattagaaaggatgtgtttgctggacagccaaaacaaagacaaatagcacttaaacaacagcagcgaaattctctttacagtttgatcaaagaatgtcaccgagaatataagtggtcaattgaatggatgtgcaaacaagccaatattgcccggtcagcctactacaaatggcttaatcataagccaagcaaacgtgaactaagagatcaaaagattcttaagcgtattaaagaaatagctgagagcaataacagcctctttggttctcctaagatgactttggctttaaacaatgagctagcagacggtgaggccaaaatataccgtagaactgtggctcgcttgatgtgcgtgaatggcatctatactagcaaggccagatttaataagaggtatcgctatcaagctgctagaccggaagaaactgccgaaaatctattgcatagagacttcaatgccactaaacccaatgaaaaatggtgcactgacattactgaagaaaaaattcctggaacaagtcaaaagatttatctctgtactatctttgatctatatgatcgtttccctgttggctatgctttaagcaagcgcaatgatacagccctagttaacgctgctctgtcaactgcttggaaaagagagcccaatagtcatgcaatgcttcatagtgatcgaggatttcaatttaccaggatgccttttaagcatgagctagaagaacatggcatgccacaatcaatgtctagaattggccgctgtattgataatggcccaatggaaggctggcaaggtttaattaaagaaatgcgagaagttctttatccgaaggcaaatagctatgaagagatggaaaaagcctttaaagcaagtattgaatactatattaattatgatcctcaggagcgcttcaatggcaagagcgcaggtcaggttagaaaagaagctaagaataatccagagaatataatttcatatccaataaaacaagataaaagatataaagacttttggaaaaagattgatgaaaagaaaaatcagctcgcacaatagcgaactgattaatcaaattaatttatatatttaagctgtctacttgacacggtacggatcatttcgagtagtcgtctttgtttgttgaaggtgaaatttcaacaaatctatcttagtcagaacttggagttatctattagtaccagccatttgcttgccagaaacttttagcagcgctccaagagccatatctagatttgacataattatccgctacacgttcttggttagcagctgaataatcaccattcaaataagatgaagaaagttgatacttacctacatattggccatttctagcactgtatgagccaccagattctttgcttgcaatccatgcctttgcactagcttcggaacctgtcgcggttgatgaatatgaactagttgttgtcgtcttaggtgtgtagttcacatttgaataagtgtatgaactttgactttggctagcttgtgtagtttgttgagctggcgtttgtgtttgagtgtaggtattttcttgtctagcttgagtattttagctagtagtataattagttgccaatacccattgatttaagccaagatcataccacttctgtccctttgaatcataagcagtttttataatcttccagttagtacctgcagctagagtttgaccagttgcaactggattttcatagttattgtaaacggtagtagcttgtgtagttgtatacactgctgcatcattttgcacaacggcagcttgtgcttcattattatctagttgattgattgcaccaatacctgcaagtgataaagcagcaacagcaatagtcttagttaaaatagatttagttttcaaaaaacatctctccttaaattaaaacgtcaattactattcatcatttttgttttattattctcttgcaattgacattttatataatacctgcttcgagttgcagttccatcacagtcagatcacacaatgattaaagaaaaatgttttttcgtaacagttggaaatatttttaataaatctagatttctctgcaatatttgtaaaaatcatgcaatatatgaacaaaatttgacgacaaaataagcatccctacgccataaaagatcgttttagggatgcttatttaattaataatctaattcttgatccatacttgcaggccagccaccaataccacgtttttgatcaaggccacgcaatgtctccatctcttcagcagtaaattcaaaatcaaaaatatccaaattatccttcatgtgtaacggattcgtcgagccaggaataatcatgatattttcttgtaccaagaagtgtaacgcaatttgtggcactgtcttattatacttctcagccaaagaaagtaaggttgggtcattaaataaagccttcattccttcaccgagtggtgaccaagattcatgtacaatattattttcaattaaatatttatgcattttcttttgttgcttaaagacagacgtttcaatttgatcaactactggcttagtatcgaaattattcataatttcatttacttgatcatggttgaagttactcagtccaattgaacgtagctttcccgcctgatatgcctcctcaagtgcctggtaagtacctaaactatcagacataggccagtgaataatcattaaatcaaaatagtcttgctgggcgtgaattaacgattcatcaatcccattcttcgtctctctataaccacttgtttgcgctttagtggtcaaaaaaatgtcttcacgtttaatgccgcttttgttaatagcattgcctacttctgcttcattactgtatgcttgagcagtatcaattaaccgatatccagccttcaaagcctcgacaaccgctccttcagtaattctaggctgaattctatatgttccaaagccgaagattggagtttttacaccgttattaaaagttaaatatttcatttttattcctcaatattttattcaggatcagatgcagagtgataagtaatactaaatccagcttgatattccttacctggctccaaatgattcataccatatttgtgctctagctcaccatcagcatcttctctatctgcaattccccaccatggctcaatgcatacataattagcggtatttggatattgtgaccaaatgccaacatatggtgcatttctagtccaaacattgatgtggaacttactcttatcagttctcaaagatactttattgtcatgaccatgtaattcataaatcaaggcatcatctttaaatagctcatcacttaaaccaataaaactatcagtcgaagctagagaacgattattccagtcaagatatgctcctttaagtgggatttttaccctagcaatagatggatgcatatcgaaataataatcttctttctcttccccattatttactggtaagttaaatccagggtgaccacctacaccaaaaatcatagtttcatctgatttattaactacgctaaagttttcttccaataaattattcatcaaattatagttaactctgaattcaaatttaaatggatacatttcacgcgttttttcattatctttcagtaagaacgtgatactttcttgtgtatgattctccacttcaaaatcacaatcacgggcaaaaccatgctgacccatatgataggtcttaccttgatacttatattcatcattcttaagtcgccctacaattggaaaaagtacaggtgcatgtctgccccagatctctggatcagcttgccacatatattcttcaccggtatgagctcctttaacgctctgaacttcagctccgtgatccgaaatcactacttcgatcatattattcttgattgtgtaatccataactaaatttccctctacatatcaaacagttaaaaatcataatgtaatcgcttaattacttatattttaacattaatgcgtcaataagccagaataaaaacaaaagaaacatactaacctagtgttggatcatgaatcgacggattcacgatctggcactttttattttgtctaaaatagaaagtgaagataaagcaaatcaagtcttcagctttttagacacttgatgtcgtaaaagaaacggactgctttaccacctattcttaagtctcttcgaagtctgtgggcacttagatgccgtgtttagaaaattagaattaataggttgataaagaggtttatcttcacagcggaggttatattatggaatcacaaattattttcggtattgatgttagcagtaaatcttccacagtttgtgtggttaatgaccggatcaaacaaggcgaatcttttagaatctctaatgattcctttggctatcaaaaactttatgagcaactgaaccaatatttgataactcctttagttgttttcgaagctactggtgtttattctctaagcctgcaagctttcttagaggattatcatattaagtatttgaagcttaatccgcttaaagcgaaaaagctaatggacaataatttacgccataataaaactgataaggtagatgcttatcgcctggctttaattcaatttaatgccccgcaaaagttgcgtgatccacagcccagagagtatcatgaacttcagaatgccagtcgctattatgaagaacttactaggagtatagttactactaaaaatcaattgcaccgcaacctccaatccactttcccacaaattgaagaaatactgtctcatccatctggcagaatttattgggcgcttgttagtcttttcccacatgctggatatgttctagaaaagaatgagacacaggtaactcaaatgcttaattctatttctggaataggacaacaaagggcacggtacttaaccacaagattatacgcttttgctagagaagcttatccttatgattccaaagatagtattatcgttagagctattcaaaggaacatttctaatttgttttcactccagcaagaacgcgactatgtaattaactacatggaaaagctggctaaagcagtaaacgctcgtgctttatccatctatttgagtatcccaggggttgctagaattacagcagtgagattagtagcagagctcggtgatctaagacggtttagcacttcagctcaaattgatgcgtttgttggcattgatccaggaaggtaccaatctggtgaaaaagacagttctcttggcattaccaagcatggcaatcatattgccagaaaaatactttatcgagttattattcaaatggagacggtaaaggctacgcagccttgccatataactgattattatgacaagaaaaaacgatcttcaaatagccaaggctataagaaaatcgccattgcatcagtccataaactgatacgcacaatgtttgctcttatcaaacatgatcaattatatgattacaacatagccaccaaaaataaaagactttagctgaaatcaaataatcaacttaagtataagcaacctatggaaaaactacaagtattcataggcttatttgtggtactttcgctttttcttaaatttaaactcttatttgctttaaccttattcgcatcattaaaacaagtaaatttattttcttaaatcattgataatacttgactttgggtagaaaaaaagcattcaaactttgaattgaatgcttcattcgtgattctttgatcaattagagaataaatttagttaagtctttattcataataatatcgcctaacttatcttcaacataggcttcagtaactgtgatttcacccatttccatatcaggcccttcgtaaagaacgtcttctaagagcttttcaagaatagttgaaagtcgacgagcaccaatattatcagtgccttggttaacatcaaaggcaatctccgcaattttatcaacggcttcttgggtgaaaactaacttaatgccatctgccttcattaaagcaatgtattgcttaagcaatgaattttgtggatccttcaagatcttgacaaaatcgtccttggttaaagcgttaagttcaacccgaattggaaaacgtccttgaagttctggaatcaaatcactaggcttactttcagcaaaggcacctgcagcaataaacaaaatatgatcagttgaaactgggccatattttgtatttacagttgagccttcaacgattggtaaaatatctctttgaacaccttcacgagaaacttcaccagaattacgtttattaccagcaataattttatcaatttcatcaataaagataattccgttattctggcttctttcaatagcatgttgatagatagcgtcatagtcaactaacttacgtgattcttcttgaatcaaaacttcacgtgcttcttttactgataaagtacgcttaacctttttcttaggcataagatcactaagcattgagcccatatccatccccatttgacccatcatgtcactcattgggttggccttaggagcttgttctacctctatggtaacttcgtgatcttcaagtaagcctttagctagcttttcagccacatccattcgtttgtttcttacatcagcagaaacatcctcttcatgatcttcttcgcgattattttctcccatcaacatagacatcatatcttgcatttgctgcatttgattttcacgacgttcatgtttctctgctggagctaacaaacgaactaattctttatttgcttctttagttgcttgagtctttacacgagcaaattggtccttttcttccattcgtacggcttcggaaaccaagtcacggaccattgattcaacgtcacgtcctacataacctacttcagtaaacttcgttgcctctactttaacaaagggagcttctacaatatcagctaaacgacgagcaatttcagttttacctacaccagtaggaccagccattaataaattcttaggcgttacttcacgttgcatttctttagataactgcattctacggtaacggttgtaaagagctatcgcaactgattttttagcttcatcttggccaataatatattcgtttaaaattttaactatttcttttggggtcttaatagccatttccttcactcctaaatttcatcagtgacaattttatcatcagtgaaaacatcaattcctgaagcaatctttacagcttcatgtgcaatttcatcggccttcatatcttttgcgtgtcgagtcatggcaatcgctgcggcttgagcaaaattaccacctgaaccaattgcaactacgttttcatcaggttcaagtacttcaccattacctgaaattaaaagtaggtctttgtcatcaaaagcaatcaacattgcatttaatttttgtagagttggatccttacgccatgcttgagccatttccacggcagcacgacgaagatcgcctgagtagctttcgagcttgccctcaagcatatcttgaaggctgactgcatcagctacaccaccggcaaaaccaattactacacgatcatggtaaatacgacgaatcttacgcgctgttgccttggcaataactttttcgcctaaggttacttgtccatcaccggcaattgctgtttttccattaaatcttactgaacaaattgttgtcatgttaaacctcaactttctttattacgaggaaaatatttttgataatctgattttaaatgagccattgttacatgagtatagatttgcgttgctgatagactactgtgtcctaataactcttggacacttcgcaaatctgctccattattaagcatcgcggtagcaaagctatgtcgcaactcatgtgggtgtactttaccactaattcctgcctgattaaaagttttttgcattacagtttcaattccgcggctagtaatgccagttccttgattatttaaaaatacatgctgttcatcatcatttttaagtaataatggacgtgcattttctaaataagcaatcaaagatttttttgttttatcatcaaaagcaacatagcggtctttatttcctttaccgtgaaccaaaattgtctgtaagtctaaatcaagttgattcaaagtaagattactaacctcacttacccgcatccctgtcgcataaaacagttcaaacattgccaaatttctcatcgtcaaaggcttatttcctttcaatgaatcaaaaacctgctttaattcaggctggtaaaaaaattgcggtaattttttctcaccacggcgtaaagtaataccctgagttggatcgattgccactagtttgcggcgggttaaaaagtggtaaaaagaatgcaggctggacatcttgcgcaactgactactacgggctaacttgcgttctgctaaatgttgtagataaacctggatatcacgttctcttactttagtccaacctgggaatccaccattttcatgccaaaacctttccgcttcatgcaaatctgtttgataagctaaaacggttttcgcactataatgacgctcattttgtaaatatgataaaaattgatctaactcactttgcctttggttcattaatctaaaacttccgtcttaaattcatctaaactagcaagaccacgttcactgaccttctcatggcgctcacgcttcttgcgaatcttcttaccctctagtggaggtagcaaagcaaaactagcattcattggttggaaatgtttagcactcgtagtagttatgtagttagccattgagcctaacgcagtatcttttgggaaagccacagtatctttccccatagcttcacgtgctgcattaattcctgctactaagccactacctgcactttctacatagccttcaacacctgtcatctggcctgcaaaaaataatccaggctgctcttttgcctcgtaagaagctgtcaaaacttctggtgaagccatataagtattacgatgcattttaccataacgaacgaaacgtgcattttctaagcctgggatcattgaaaatactcgtttttgttcaccaaatttcaaatgagtttggaaaccaacaatattatacattgaagctgcagcattatcttggcgcaactgtacaactgcataaggagttttgcctgtatgtggatcttctaatcctactggtttaagtggaccaaaaagcattgttttagccccacgcgctgccattacttcaattggcatacacccctcaaaaacatcgctattttcaaaaccatgtaattgcgcagtttcagcgttaattaattcctgactaaacttttcatattgctctttagtcataggacaattcaaatatgcagcttcaccacgatcataacgcgactttttataaacaattttcatatcaatcgagtcagcggccacaatcggagctgctgcatcaaagaaatgtaaactatcagttccagaaaatttttgaatctgtccagctaaagcatcactagttaacggaccagttgcaataattgtaatcccatctttcggaatttcagtaacttcttcttcgtgaacagttacattctctaacccacgcaaagtgtcagttacgtatttactgaaactatcacgatcaacggctaatgctccacctgcaggcacttgagttttgtcggcagctttcatgatcaatgaatctaaatgacgcatttcttcttttaaaagacctacagcattagataattgatttgatctcattgaattggtacaaaccagttccgcaaattcaccagtttcatgagctggagtctccttttttggtcgcatttcataaaggtcaacatgaataccacgcttagctaattgccaagttgcttcactaccagcaagacctgcaccaataactgttacattttttggcatttactcacctatattttctatgttaattgtttttttcgttttcactgtcttcacgataatcaccgttaggacaaagaatcactggaccttttttagaatgcttttctactaaaaagtggccatcatttggacaatttctgccaattggcttgtcccatgagacaaagtcgcattctggataacgagaacagccgtagaatttacgatttctacgtgatttcttttcgacaacctgacctttgccacattttggacaaactacaccgatttctttaatgattggcttagtattacgacaatctgggaaacgagaacaagcatagaacttgccatagcgtcccatcttaatcaccattggtgcaccacaaatatcacaattaaagccagctggttcatccttgatttgtaccttttcgatttcactatcagccttatttaattctttcttaaacggttgatagtattcgtcaacaacatgaacccaatcctttttaccatcttcgacttcatccaattcattttcaagtcgggcggtgtaatcaacatcagtaatatctgggaagaagctttcaattaagccatcaacaatttcacctaattcagttggtacaattgaacgaccatcaagtttaacataatagcggcgttgaattgtatctattgtaggtgcataagttgaaggacggcccacgccattttcttccaatgcgtgaactaatgatgcttcagtatagcgtgctggtggtaacgtaaagtgctgtttgttatcggacttagtcatcttgaccttgtcaccctcttcaagatcaggtaagtcaacattcttttcttgttgattatcataaaccttggtgaaaccagcaaatttcaatttagaaccagtagttctaaaaatcacaccattttgaacaatatctgcacgaacagtatcataaacagctggggtcatttcactggccaaaaaacgtgaccaaatcaatttgtataaacgatattgttccgtagttaggacactctttaatgactccggtgtgcgatatacagatgttgggcgaatggcctcgtgagcatcttgtgcgtcttcttgattcttaaaatggcgttgactcttagctgcaaattctgcaccataattttcatgcaaaaacttagaagcctcttgttgggcaactggtgatgttctcttagagtcagttctcatataagtaatcaaaccaactgttccttgcttacctaaagaaatcccttcatataattgctgagcaatactcatagttctacgagtacgataacctaaacgcttattggcttcttgctgcattgtagaagttgtaaatggggctgctggctgacgccgacgttgccgagcaacaactttatctactacaaagtcctttttcttatcgattttagccaaaacatccttaacagaatcgatattaggcaattctttctttttgccatcaacaccataaaaggcagatttaaaagtttctttacccttagcaaattccgcatcaattgaccaatattcttttggcttaaagttcttgatctccttttcacgatcaatcactaattttaaggcaactgattgtacacgtcctgcagataaaccttttttaactttggcccaaagaattggtgaaagtgaataccctacaattcgatcaagtacacgtcttgcctgttgggcatcaaccgtatccatatcaattgtccggggatgcttgaagctttctttaactgcatccttggtaacttcgttaaaagttactctattcttggctttttcgtcaagattcaatgcgtgcgctacgtgccaagcaattgcttcgccttcacgatcggggtcggatgctaaataaacatccttagccttcttggcttcgctttttaattctttaatggtatcgcctttaccacgaatggaaatatacttaggcttatagtcgtcttcaaagtcgattcccatttgtgacttaggcaaatcacgaatatgccccttggaagcaataacgtgatagtttcttcctaaatatttttcaatagtcttagcttttgcaggtgattccacaatgactaaggtctttttacgtttttttgttgttttacttttcgctttagtaggcattaactgcctccttaattcttattttattttatgggtacagtccaaaaataactaatactttctgaattgtcaaatctttatcttgttaaatttaaaatcaacaattggcgtagctcctgcttcaattaattgattgggacctgcagacaatgcattagtaattggtccaggtactgcataaatatcgcgattttcttgtaacgctaaattagcagtaatcagtgaacccgacttttctttagcctcagtaacgattatactttgacttaagccggccaagatacggttgcgttcaggaaaacgatacggacgcggtggtgtatcaggcaaatattcactaatcaatagtcccttttgcacaatctcttcttgtaaagcaaaattttgcattggatatgaaaaatttaaaccattgccaataaccgcaattgtttttccttggttgaaaagtgcagccttatgagctaaggcatcaacgccttttgctaagccacttgctacaacctgaccagattgcacaatattaggtaccaagcgattaataacatcttgactatacttagtcggatagcgtgagccaacaattgtaatgatttctttttgcagtaaagaaatatctcctcgggtaaacaataccataggtggtcgataaatttgacgtagtttttctggatatgcttcatcgaaaaaactgattacgtcacactgctgttcaatttgttgtaccattcgatccaactgatcatcctgaaaagcgcgatagcatgcatccattagttcctcagttaattcaatttgttctaattcttcaaattcaatttctgtttcatcagttacctgattagcaattgtcagcaatttaacataaccaatccctttttgcaattttaattttagtagaaattctgtttttttcataaaaaaagccctccactatttattacgcaaaaagagaccattatttttttataaattgaaatttattcaaaaaaatcactgactggagcaaatgttttgcggtgaattggcgtagggccatactttttcaaggcttcaatgtgctccttggtgccgtatcctgcattatgatgaaagcaatattgagggtatattctatcataatcatccatcaattgatctcgaaagaccttggccacaattgaagctgccgcaattgaattcgacttagcatctcccttaatcaatttaacttggggtagatttactggcacattcattgcatctaccaaaagtgcattcggcttaacatcaagtgctcgtactgcttgagccatcgcttgacggtcagcttcataaatattaatttgatcgattacctctgcactttttactccaataccaacactaactgcttccgctaaaattttaggatataacttcaatcgtttctctgggctcaatttcttcgagtcgtttacatctaataaatcaaaatcttgatcaattatcacagcagcagttactaccggtccagctaaagggccacgtcctacctcatcaacacccgctactaattgtcccttttcccagaactttttttcataagaaaagcgacgcaaaaactcttctttttttgctagtaattttgcttgacgcttacgataactaactaacaatttttgtacgccggcccgcggatctgcctcaagttcgttaatttgggcttcagagacctcagatttcaacagctcttttatttctttaattgtcatggtctatctaacgtaatccttccgattgcacccttacgcaatttttgtaacataaataatgaaaaacgatcataatcatcacgcatgccatatttttcagtcattgacaaaagcaaatctggatcagccatatcagcaatttgctgttcaggtaatttagaaaatttaagcaaatccttagcataaaattcacgtaaatttttcaaaacaaataatgctacatcatctgcatgaaaaacactatccttaattgcaccgaaagcagctaatttataaccaacttcctgatcagaaaatttaggccataaaatccctggtgtatcgagcacttgaatattagcatttgttttcagccatctttgtcccttagttacacctggtttgttaccgacttcagccacgttccgaccaactaaacgattaatcaccgttgacttgccacagttaggaatacctgccaaagcaattctaatagtaggatttgaggcccctcgtgcttctagcttctctgttttggcagctgccgccttttttactaaggaaaccaacttctgcatattagtattgtgcaaggagtcaagtgccaaaacatacttattatctccagctaattctgctgcccatgcctttgttaaaactggatcagctaaatcagccttatttaagataataatatgtggtttattaccaactagtccttcaatcattggatttcttgaagcttgcggaattcgggcatcaagtacttccaccaaaacatcaatcagtcctaacttatcttccagttgattacgagccttgttcatatgccccggataccattgaattgttgccatattatctcttctttctaaaattaatcattttcatcatctaagaacaccacttctgacatcaaaatctgtctatataaagccagaaagcctcgacgatattttctctcttgttgtgcaattttacctaaatagtcacgttcttgtctaaaagcatatctatatacctcagctctaaattctttctgatcatcgggtaattctttttgtttaattgtatactttatttccctagcaaaatcaaccatagaagtttgattcatttgtgcccttaaatcgaattttaattgttttcgaatctttttaggtaaatagatctttttcatttgatccatagcatactcaatcattgccacacgaactcgatcaacttcctttctttgatcaaaatcaggtatatctttgtccaagatcatgtgaaaaacaattgttggaacaatcatacttagtaaaataagcgtaatttcactcaccaaaattaaatggaaatctgctacattaatacgtaaatcatataacgtatatgctaaagcaaaagtaactgctccatgaatgccacccagactaaaaatcaatgcttctttacgtttttcctttaatagaagggctaaatcgataataaaagtatctaataagcaaattagctaggtataaaattattccgttataaaaaataaaggcattagtaagcctgcttcgctcagattcaacgttatgaatcaatccggctgcaacgactgcaataattccagaaacgtgaatttcttctgctaaaaaatatattattaacagtgtcaaaaagaatatgacttcaaccggcattgcaacaccagcagataaatgatatttggagcgaaaactttcctgacgcaagaaaactaataaagtagccaccaaagctcctagaaaaatacctccacctgcagaatataaaaaattacctattgcttgtccaatccgtaattcttgatgcaagtaccaatcaactgccatattaagcaaaatgatacctgaagcgtcattaaacaaagactcatcttttagctaaaaagcaatcttcttaggcagcttcaatccatgtgttacagattctgttgctgtagcatctgttggcgttgaaattgcagccagaataaaagccagtggtagagagacccatactaaaatagatcccgaatcccgcagttatagttgccaagataatcataataaccgttaacccaactattgcacgccacgaacgtaaaacattgtacaacctagtacgttgtccctcaaaaaatagtaatggcgctacaatcaagcccataaataattccgagctaaagctctcaattaatgaatttgtttgcggtactagtgcaatagccgctccaatcgccattgcaatgtaattaactgatattctcttcaaaaagcgttgttgaataatcgtcgcaaatgctaccgcaaagacaataaaaccaataaaaattactacctgcatttttctacccacttaataaaaaagcccaggcatctatcaggcttggacttaatacatcattttgtcttcatacattcgataagcacgatcaaaaattgacatacttggtaaataactagcattcaattccaaataatctgacaatttctcataatcttgttcttgcttaggaaaagtcaggtcatgctgtgcattattcgcaaattgagctacgtcatcagctgaatctgcatccctttgcgtcattaaatatcgataaaaactttctcggtaagccataattactccacataatataagatcgcataagcaccattgccagcatgtgttgcgataattggacttgtctctgccactaaaacattaattgcaggattgattgcacgaattttttcagctaattcttccattaattcaggtgtatcaacgtacgaaatgcctacttctttaatatgctctttattatctgcgatttcttttaacactcgttcatcaaaagcacgtgtaaatttcttacctcgtccttttttggctacgattaacttaccttgtggcatctgaagagcgattctaatattaagcatagtagcaattcgaccagaaagtgcacctaaacggccacccttgattaagttttgtaaattaactaccatcatttccagtttttgagtactacgaatctttttaacatgatcaataatctcagccatgcttttaccagcctgagcatccttagcagcagccaaaacttggaagccttctgccctgtcggttagttcagagtcaataattgtaacattatcgctttgacctgcaatttctgcagcttgacgagcggcatctatcgtaccacttaatgatttagctaagaaaataccaatcacttgactgccatctgcagttaattttttaatcacatcaacaaaacggccaattggtggctgactagtcttaggtaagctctccgcttcgttcatcttcttgacaaaatcacttctagtgatatcaatcccatccacatatgacttaccgtcgatggtaatcgtcaatgggactactgtaatgtcatatttttcaacttcttctggtgttaattggacggaagagtccgtcataacttttatcttcgacaacgtattcgccttcaattctaatttgtttacccgatttatgataaaatgtaagcaacatatatactgtattgtatcaaaaaactattagaagaaaaaaggattgattacacttcatgaaaattagcaaactttggcagcaaccagaacaacgatcagaaaggtactaccttctagataatatttttagtgccataactcatgggattggtttcggactagcagttaccggcttagtaattttaattgtaaaggcagctcatacaggcagcccgatgcgagttgttactttcacaatttatggctcttgcctggtactgctttatttattttccacactatatcacagtttagtttttacacgggccaaaaatatttttcaaatttttgaccattcctcaatctttcttttgattgcaggatcttatactccatattcacttgttgcaattggtggagcctgggggtggactttatttggcttgatctggggcctaaccatctttggcatcatttactacatcttcaatcgtggtaaacacgtcatacttgatacaatcctctatgttgcaatgggatggttagttatcttgtcaggatcttatttatatgttcgcttaagtccaactggattctggctattagttagtggtggcattgcttacacaatcggcgcgattttgttcagtatgcgcaatgttccctttatccatactatctggcatttatttgttatgctcggttcaatcttaatgtacttttccgttttactttatgtttaaaaaatgtagcagttgaattctgctacatttttctttctattcaattgtagtcaaatagctttcaatcgcttcttgattattctcaacttcacctgaaacaactaactctcgaattttattcaaagtctgccccaattttgcacctggtcgcatcccgcgatctattaaaaatctcccatcaacggctagttccgacgcttttttaataggtaaagccatataacgatcaactaaagcttctgaagaaattggttgaccaacaatatgagcaacgtcaatcgtattaattaatgtctcttcccctgctaagaataattcataatcactaggagcatgactagaaagtaaatcaaatagattaataattctttcgacttgctcagtcatagcattagagtttttccagtcacgcataaaacgatgaatttgttcattcggtaatttcaatagcaaaattatcagtgaccacaaactattttccatcgttgtactgaattttaactgtgggaaaatagctagttgatctttttttccgccaaaatcaggtacatcttcactcaaatttgtatcaagaaaaacctgaaaagcttgccgagcatgtggtcctaaacctaattttacaaattcttctcgaattcgttcaactgaaatttttttaagtaatttatgattatccttaattgcctgttgggtcttgctttctaacttaaattcaagttgactcataaaacgtacggcccgcatcattcgcaaagcatcctcgtgaaatcttttttctggatcacctacagcacgaataacatggtttttgagatcatctagtccgttaaataagtcaacaatttgccctcgtgtatccattgccagagcgttaatcgtaaagtctctacgctttaaatcttcatctaagttttgaacaaatgttacatgatctggacgacgaaaatcttgataacccgattctgttctaaaagtggtaatctcataactttcaccaccataaaggacagtcaccgttccatgtttaattcctgtatcaattgacttatcaaataactcttttacctcttctggataagcactagtagtaatgtctacatcatgaacatgacgatgtaacaaaacatcgcggacagaaccacccacaaagtacgcttcaaagcctgcattttctaatatctgtaacacgggcattgccttggtaaaaatttctggtaaattatctatctttatcatattaaaatctcaattcttattgtctttattattacttttgctatacactttgttaaaattgaggaaagacataaaggaggtaatcattatgcgtaagattgacaaaagtatcttaattgatatcctcatgatcgcgctaggctgtgctatttacgctttaagtctagacatgatttctgtccccaataaactagccgacggcggactaactggtatttcacttcttctgcggcatttttggggcatcaacatgggactatcgacccttgtattgaatattccactaattttgttaggctatcgctttatgggcaaacgtcttttagcctatacaatctggggaacgctcagtctttcctttttcttatggttttggcattcagtacctattataaaacaattagatttagaacacgacctcttcctttcagcaatttctgctgggttattgtctggaatcggattagggttagtatttagatataatggtacttccggtggaactgatattattgcccgaatctgtcagataaaatttggtatttcgtctggcaaaatgcttttagcttgtgatgcaatagtactcttcgcatccctatcttacttagacatcaagcatatgctatacacattattagcttcttttgtcttatcccgagtaatggataccgttcagcaaggtgcatacacagcccgtggtttattaattatctctgacaaatatgaacaaattggcaagatgattgatttaaaactaaatcgtggtttcacatatctaaaagctttaggtggctatcaacaaaatgaaaaacgtgtaatttatgttgtagtcgcaccgcgggaaattccatcaatcaaagctttaatcaagcaagaagatccacatgcttttgtttcaataattgaggtaaatgaggcaatgggagaaggatttacttataaaaaaccacatcgctttttcatccacaagtaaaaagctataccatgatgcatttcatgatatagcttttcttttactaataattaataattacagtcaatacgttattagctttaacgtattcgttttctccaatttgaatgaatggccgttcatcaatttctttatggccaagatttttaactttagagccttgtttaacaaacttacctggaattggctgaccatttttatcataaacatatgatggatgcttaatgcggttaattgtctcggctgtgtccttaatgtatggtaaaaatgccccttccttaacgaatttattcttaccaatcttcacaaaattattgccattaattgatttaatgcctaggatcttgtaaacacggcccttttttaaatgtccaactttttctcctttacggttaaaaatcgttgcttttctagtcaagtttaactttttaccctgacgaattggattagttagagctgcgttaactgtctgagcagtcatcgcacctaaacttaaggaggctaagactactcctgccatatacataatttttttgttcatcatgatctcatcccctaatcattacttaatcttcttacttatattttaacaaaaaaatgcagaggttatacacttttctctatttttatttatgggatcaataacacttattctttgcaatctttcatggcaagaactaatcttagcttgtaagcgtttatcaatattaagcaatcaagaggttgaaaacaatgccaaaaaaaacagttactcccaagaagctttcgttcatgtctatttacttcttgggaattaatggggtaattgggtccggtgcctttttactacctcaaacaatctataaagatatgaacttgatgagtgttttcgtaacaatttgtgctgctcttacagtaagtatggttactctttgttatgctgacttgtcaagtcgttttactggatcaggcgcagcttggctttattcatatcacgcctttgggtgatttactggctacgaacttggaatatatatttggtttttaggatgctgtacatatgcggcagaaatagtagctttgttaactattttaaagactttgtcccctgtttttagtaatcacgctgtttactacgggatagctattggaataattgtgctgtttacgattattaacttatttggtcggacaattgtaaaattagtcgataacttatcctctgctgccaaaatgattactattctgatttttatcatcattggtgccttttttattcataaaatgaactttacacctgtgattcctaaagcagcaaccttagaggtgttggcccttacttcaaacattttggtgctgcatttagtgtagtattttacatgtttactggattctcctttattccaattgctgcaaaacagatgaataatccagagaaaaatattcccaaagtattgatctcagtgatgatcactgtgactattttatatgcattaatgatgttagtagctatcgggattttaggatccaagatggttaattacagtacgcctattgctgtagcctttcaaaaggccgttggtgattggggctacgttctagtgattgcagggatgctgattagtgttatcggcgttgcttttgcaggatcttttaatactccatcgttgattgcttctcttgctaatgagcacgcaatgttgcctaaatggattggaaaaaagaacaagcatgatgctgcttgggtagctattttactcagtgcaatcatcactatgattttaatcacacaatcatacctcttcttggtatcctgcattgtattggcttcatttattcaatatgtaccatctatcttagcagtaatcaaattcaagcatactaatgaatttccaaataacggttttaagctcccattcggctacgttattccagctttagcattaattatctcatgctacatggtaaccaatttcacttggaaaactattttggtcggagtagtcgtaggggtattagccgcagtagcttacttcttcattgaaaaagatgaaaaagttgaagaaaagcatcaaaagtatttgtcaaaaatgcgcaataaataattttacgaggtaaacgggcgatgattatcaaattatcgtccgttttgttaggaattaatgctaaactgttagataaataatattagaaaagagaaatcataaatgagtaatcaaaaagctaaaataaataatgctgaaattaaaactagagtaccccgcttcagaccaagccagtaaaaaacttaagttaacacaaaaggaaaaacatatgtctgaagagataattaacacagtcacaacaaaaaatgattttaagagtgcattgagaaatgtggatattaaagatgatgataccgtattagttcatactgcactaagtaaattctattacgttcctaatggtccagaaaccattgtcgaagccttaaaagaagctgtgcctaatggaacaataatgatgccctcacaagtttccacaaattgtgatccagccacttgggaatatccaccagtacaaaaatctttgattcaagtagttaaggatgctatgccaccttataatcctacaacatcaatgacagaaggcttaggggttacgccagagtatttcagaactttgccagatgttgttcgaagtactcatccttacttgccaattgctatttggggcaaaaacaaagtaaagattgcacagaatcaacctttaaatattccttatggaatcgacagtcctttagattatttgtaccagaataatggcaaaactatctttttaggaactgattatgaaacgtgtacagttttgcactatgcagaatccacaattggtagaaaaaccgaaacatgttctgctgcaactagtctggatgaaagcggcaaaactatttggactgaatatcaaaatattgatatggattcatatgatgactttaatgaattagggacagagtttgaagcaaagcatccctctgctatcaaaaaggttaagttaaacaatggtgtcatcaaagtaataaatgtaaaaccgctaattgattttgctagaaaatggtttacaaaaaaagacaataatcattcaatttaataataaaaggaagaagttactttccacttcttcctttttctttatttaatctttgttaaaacctttgcacctatatttaaacctacactatgcgatttaccgccccaatcacgttcatcataattatccatatcagctaaagtatctgcagtgaaaagaaattgtgcaaaatcaatctttctaaactgagcacatgctgctaaagctgcacattccatttctacagttgacgcgcctaactgacgaaattgtgccacttttttaggcgtttctctaaagaaaccatctgttgaccaagtcgttatctcgtcatattctatatttagctcaactaaaatcttttctacttccttcaaaaatatagaatctagttccacaagttgtccaggattcatatagtgaaaagatgtcccttcatctcgaattgcacgtgttggaagtagcatcgcattttcaggtaaatctactaaggcacctgctgttccaatggttaacaccttttctactccataagcaattagccattcaagcaactgtacagctgccggtgctcccaagggcgcttgacacaaagtgaaaaattcgttattaatttgaacttcataaattttaggattaaaagaacatgactcaaattcacctaaagtacggtgaaaatggtgatctaaaaatgcattaatttctttttccggcacgaatgcgtaaagcaatcttggatgaaactgaaatggctcttgatcatgatttggttcaagaactgcatgcttatttttgtcaaagtctaaaatgaatggttgtttgttcatgtataccctctcccttaatcaataaatggatagtcttcattaaagtaatgatcaataaaaatttggtgttgcttgttaaaaatcttgggtaatttatctttagaaaaatacttcagatcaagagtttcagagctaatctcttttgacattttttctactaattcaatagttactgcctgtgccacatcttaattaggataatgctggataaaattagttgaaacgcctaatagtgacttagttcttacttttaagccagtttcttctaaaaattctcgaacgcatgcttttggggctgattctccaaattctaaagcaccaccaggtaagccccatgcattaaaatctgatcttttttgaagtaagatttcattcttgctattagccaaaattccaccagcaaaatttagaataattggttcatgaccaactttttgacgtaaggtcttaatatagtttttaaccatcgctagtcctctacttgaatatcattcatcacaatttcaacttcatcgtctaaattcatctgactagtaaaagcatactcgggaataaaaccaagataatctttttcattccaccatgagcgcattctttcttcaccaaaagaatgttcatgacgagttttatggcgtttcattgtttcttcaaacggaatatcaaaataataggcataaatttgatcaccaaaaagctgctgagattttttgaataaatcagcataccatttcgcattcaagataccttctaaaatagtgtaagaacagtgatgataaccatactcaagcaagttttctaataatggcaaagcaaatgtcttttctccgtctttaacattcagcatttctcttctaactgtatcttgtggaagcaatagtgtattgtgtggcaatcgacgatgaatttctttagacagtgtagttttgccactgccagagtttcctcgaattataattaattttgatgtcatcatagaaatcttcactttcttaaaactagtttactgcagccataatgaaactgtcaaatcttttgtgtaaatagttctttctcgtaaattgattttttaattatttatttaatcaaagtaggattctaaggtgtcctgaacctgaccaaagcctttatgaattcgattgaaataacggtcattgtagctcattgcctgaataccaataaaagcatcaagcgactgttcagttggaaactctgccttaggcttagctttgcgcttgatcacattgttaaatgattcaatcatgttagtcgaataaattgaagctctgatctgcttgggatagttataaaagaccagcagatctggttctatgtctttcaagcttctgataacatggctgtaaaccttgccccatttggtatagaagtcatgcaggacagctgtggcttcttctttgtttgtctgttgatgcacctgtttgaattcgttcatgatcttttcacgatcgtcgacgcgtactttagcgcagatattgcgcatgacatgaaccaaacagcgttgaaaatgagctttaggataagtcctggccaaggctgttttcatgccaacaacaccatcagaaagaaagagttcaacttgcttcaagcctctggacttcatgttttgaagcatctctgtccagacttcaatgttctcactaggagcaatgcagtagtcaatgacttccttatgtccattaggtttaatgccaatggcaatatagactgcttcacgctcaaacgtttctcggcgcaaaggaaggtatgtcgcatccaaatagacgcagaaaaacttgtcgcttagcttgcgtttgtggtaagcctcaacctttggaatcatctgcttggaaatatttgatacctgagctggactgtaatggctgccatacatcttttcaattagatcggctatttccctggtggtcacgcccttggagtaaagcttgataatcatgctttccaagatatccgagtgctgcttgtagtcaggcagcgtgtgctgatgaaattgaccgttgcgatcccgaggcacttgcacttcaattgggccaaattgcgtatcaactttgcggaaataagcaccatttctagagttgccagtattccagccatttctggcatagggatcatagcccagaaaggcagtcaattcagcttctagcaagttattaacagcctgttgtagttctttgcgcaataaatcatttattttgtctggattgaatagagcttgagcaaaatctttggtaaaatcattcatgaaggagttcttctttctgtatgtgttttttttgttcaaaccaatcatacgagaaaggaactcctttttctaatgtttaaagaaataaatttaaggaatcattcatccttacacaaactattttacagtctccatatttcacatatttttatttacattaattatatttttatttattattaaaataccatatttttataatattacaataatcgaatggagataaatatatgagaacaaaaatcaaagacgcacttgcgctcggtgcatcaatcatttgcattgctttattaatatttgtatcgtatatacaaattcaaactcatgtttacaaaggccttatctggtatggtttattaattttcatcttggcatttgcatctgtaatttacgtcagaaaactaatcaagaataatgctaacgatgatcaaaatgatgactcagatgaacaaatgttaaaattaaaagactttaattcacgatacctaaacgatatttggaaagatggctttacagcagaaaagccagagtggactaaatggaatgcaccatattttaacgactatactgcttaccggtccttttctagtttcaagcaaagctcgatcactgaatatttgttaagtcactcctgtaaggctattactataaatgaccaagcaatagggatggtttcaaaaaactggattgataaaacaaccctttggcttgaaattggaatagttatttataatcccaattattggcatggtggccttggaacaagagctttagaaaaatggattactgatatattttctgaatatcctgatttagaacacattggtttaacaacctggaatggcaatctaagaatgatgcatttagctgaaaaaattgggctaaaaaaagaagctcaaattcgcagagttcgctattttcaaggcttttattatgacagcgtaaaatatggcgttttaagatctgagtgggaaaaatgcaaaaacaaataaggatgatatcttgacaatttactgccagttatcatccttatttcaatttgtatcaaatattaaaagtcattcccagcaaaataagtagtactattgccaaaacaaatcctgcaatccatcctaaaatccacgctaaccacatttttatctttttactcaacaatattgcaattaaaacaaacattgcactttcagagacaatcactgaataagtaacccaagatttcaaattgaaaataggtaaaagaaaactaattactgtggaaataataaccaaaagaattggtacttttattgaagtatctcattgaaagagaatgtaaaagaaattgcaataccaataaataatggtaacgtattgaaaaactgcattacattttcttgcataaaacgtcactcccaattatttttatttaagttttgtctaatgttattttaattttaaacaaaatatgctatattattttcatcaaagaagaaacgacttaaaataagtcactttgatggggtctagaaaggtatatttatgtcactgaagtttgctaacaaaaagaagctagcactttatgtctttttagcctgcataagtgcttgtggtaatgtcgttatcgcttatgtcacgaagatcatgcttaatagcgcccaatattatcgtggctcattaaagcaattaatttttatcgctgcattaggagcagcatcactaatcattatcatgtttctcaactttgcttatagatacttgcgctccgatattacgcgtgatattaacttgaagttaaaagagaaaactattacttatttaattgctcaacaaaatgactcgcaaaaagatggtctaaatttaatgaccaatgacctaaagcaaattgaaacacttaaaattacaaatgaattaatgattatttccgaatttgctgcttttacaatctcaatttttgtcggtttaatcaattcttggcttctaacaataatcttcgttattgctacggtcatcccgggatttatcccaaaaattttcattaaagatattcaaaacaaatccgctgtctgggaaaagcaaaacgctgaatatactcaagctactgttgatgctattaacggatcaaaaactgctatgctatatgacgcacagattcccgttgtttcttatgtaattaatcgggcaaaagaaatggaagatgccttgagagcattaaactacacccaaggtgcgatttctacattaattattaccattgctgatattttcagctttatcattccattcctaatcggtgcaattttgatgttcaatgggcaaattggtgctggtactttagtaatgattgttcagctttcaaatgacttcattaatccaattacaatgatttttgaccagctcaatcaaattcgctcaactaaaccaatttgggataaagtcgaacaagctcttaagtttaaaggatctcctacttcaactgaatcagcttctacttttaatgaattaaaagttaaagacttatcatactcagtaaacaataaaaacattttaaacaaggttaactttaacgttaaagctggtgaaaaaatactactgatggcaccaagtggttttggcaaaactaccctcttaaaacttttagctggacaattatctccaagtactggttcaattatcattgaccaaaacaatttaaccagcaattggcaaaaatctcatgaatactttggctacatcaatcaaaagccattcatgtttgatcgcagtctgctcttcaatttaactctgggccaaaaatattccaacaatgagttacaaaatgcaattaaatcagctggattagcagagcttgttaaagagaaaggcctcgattatcaaattggtcaaaatggtaataatctatccggtggtcaaattcaaagagttgaaatagctcgtgcaatcttagcaaaacgtccagttttactagcagacgaagctacaagtgctttagataatgatttatctttgcaaattcacaaaactctactagaaaaccctaattttgcagtaattgaagttgctcataaaatttccaaacaagaaagagcaatgtttgatcgaattattaacttagacaactaaaatttaaaaatgacattgactgcaaatcatcgtcaatgtcattttttattatcagtattactttacataatttatattattgtttaactacaaagatagttttttctttagtttactgttaaaattacatttgcaataaacaaaaaataagaggagtttttatgattttaacctgggatattattcgcagaacaatcgagattttatggattatcaatattgcctttgcagtctggactgtttttcgcagtcatcgtagcgttgtttctacttgggcttggatgttagtattaactattttgcccggcattggctttattctatatcttttctttgggcgtcaactttcacatgacgaaatttttgctattcaaagtgctcaaaaagagacgcgtaatcgttatctcaaaaaacaaaaagctatgttggcagaacatgatcttttacccgaaaaagagcgcaaaccacgtgcccgcatgttatcagagctgaatttaaacaacgatgatgctattttaacttttgccaataaagttaaggttttcaccagtggacccgagttgtttgaccaaataattgctgatcttaagcaagctaaaacatcgattagtttagagttctacactttttataatgataatctaggaaagcgtgtcttacgggccttagaagaggcttctgctaaaggagtaaaagtcagagttatttatgatgtctctggctcacgtggtacaaaacctgctttttttaatcatttaagagagcttggtggcgaagcacagcctttcatttctacttctaaaaagcattggtttactacaccacgactaaattatcatttacaccgcaaattaatcgtaatcgaccatcatattggctatattggtggctttaacatcggtgatcagtacgttaatcaatctaaaaaatttggtcattggcgcgatacacatttacgtgttgtgggtcaatcacctatcctaatggagacacgctttgccatggattggaatacttctatcagacgaactgcattacctaaatttgatctaagcgaattacatgcttttactgtcgaacgtaaagatcttgacaacgatgataacgtagcaatgcaaatcgtttcttcaggtcccgataaccaacattatggcattcgccgaggatatgagggcatcattgctggggctaaaaactatatctatattcaaacaccctatttaattcctgaagaatccattttagaagcattaattattgctgctaatagcggtgttgatgtacgcatcatgatcccttgcatgccagatcatccctttgtttaccgagctaccgaatattatgcaaaatatttagttgctcatggcgttaaaatttacaaatataatgatggcttcatccatgccaaaacaatggtttctggctccaatatctcatctgttggttcagccaatcaagacttcagaagttataccttaaacttcgaggttaacgcttttaattacaatcttcaattaactcaagaacttaaacaaatttttgaaaaggacctagctagttgcagtcttctaactaatgaatactttaatcagcaatctaaatggcttaagtttaaacaatacttttcacgtctgttggcacctattttttagaaataataaaaccacgaagcaaaaacttcgtggtatttttttacagattattataaagatcctgcatttcatcatcttctggagctaacttaagatatctttctagcagttgttttgttatttcatcattattttgtacattgaaaaagattatcatttggcgcaaaaagtctggattatccttgaaatccggataagctagtaaaaattcgctctgtgctttctgaatatcatccaaatcctcatatgataatgccatattccaatgtgcctgtggctccacgctttcctcatctaagttactaaataaggcaatattctccttagcctggtgttcatgaacatataggttagatagctgcatacgtaaatcactattgtctggcgctacttttaaccccttttcaagtaagtcacgagctgtatccaattcattcaaattagctgctgcacgtgctcccattgaataaagtgtttcatccagttcattgtacgctaatcctgcttgagcagtcctcaatacttgttcattgtcatgctgatgatcataagcttgtgctaataatggatacgcatttacatagtcaggactttgctcaatcacttcatctaagaacttaattgcctgcttatcatcacctacagataagagaactaatcctgcttcatacttagaatcaatatctaaaatactatttgcatgttcacgaataactttggcagcttcttcataattacctaatttggcaaaagtcgcaaataatctttggtacagatttacttcactaaaagtactttgacgtttgattaaatcttgatataactcaagtgcttgttcataattaccacttaaatattcaatctctgctaaaccaaatttaatagcatcttcttctggagctaattgtagtgctcgtattaatttgtccttagctgtttctattaagccgttagtttggtaataatcagcttgtactaatagactatccaaataagctgaagagctctcagggacattatataaaagcgacagaccatcgtcatcatcgccatcatttaacataatctctgccaagtaaactttaaataaatcttctttaggaaatttagctattaaagctcgatatatttcttttgctaaatctgtaaaacctaagccagttaggttttctgctaaagatgacaagacctcgggatcatcattatctaaagcttcttttaaaaggtgtttgttttgtgaaaaatcatgattttgaattgcatctagtaattgttcagaataactcataatacctccaatcaagttaccattgtactaaaaaaagacgccggaacaaagtccaacgtcctatcacattagttaagctattacttaacggcatccttaagagctttacctggcttaaatgcaggtacttcactagctgggatttcgatttcatcaccagtttgtgggttacggcccttacgtgcagcacggtgacgtacttcaaaagtaccaaaaccgatcaattgtaccttttcacccttagcaaggttttcttgaattgaatcaaggacagcatcaacagtatttgcaacttgcttcttagttaacttagtttttgaagcaacttctgaaactaattcagccttatttgccatgaataattcacctcctgaatttgaacctaatgttcaaaaaatttttctttgtttaagctaaacaaggaaaaatgatcacaactaatcatgttccctaaaaacaaaaatatcacaaaaaccttataacaacaaggtctttgtgatattttgcttatcttttatttacgtttacgtggcaaaatcttgattggtgtacccgtaaaatcaaagttttgtcgtaattgattaatcaaaaatcgttcatatgagaagtgcatcagttctgggtcattcacaaatacaacaaaagtcggtggattcgtacttacttgggtcatgtaataaacacgcaatctcttacccttcaccattggagttggaactaacttacttgcttcaagcaacaagtcatttaagacactagattgaattctttgattttgattatcatagacttctttaaccatattaggaatttgatctaatctttgacctgtcttggcagaaacaaaaagaataggagcatagtccaaatattgaaattcatctctaatttcacgttcaaattctttagcgcttgtactattcttttttggcaaatcccatttgttaacgacaatgatgattccacgacccgcctcgtgagcatatccagccacatgcttgtcttgttctctaatgcctgtacttgcatcgagaacaagtaaaaccacgtctgagcgctcaatagcactcatagcgcgcattacggagtacttttctgtcttctcatacactttgcctcgtcttctgattccggcagtatcaacaaccttaaattttacaccatcatgggtaaacggcgtatcgacagcatcacgagttgttccttcttcattagcaacaattacccgatcttcaccaagtaatttgttaacaattgaagacttacctacatttggtcgaccaatcacgctaaaagaaataacatcatcagcttcagtatctttatcgtcaggaaaatcattaacaatctgatcaagcaaatcaccaataccagtaccatgactacttgaaacaggaatcggatcccccaatcctaaactatagaaatcataaatatcgcttcgctgttcaggattatcagctttatttacagctaaaataactggctttttagtacggtaaagaagatgagctattctttcgtctaaatctgtcacgtgatttaccacattggttaacatcacgataacatctgcttcttcaattgcaatttctgcttgagctctgatttcttcctcgatcttgccaccttcccaggtaataccaccagtatcgatcaaatcaaacttatgccccatccattcggcttgagcataattacgatctcgggtaacaccgggtttgtcctcaacaatagctaaacgttgattaattattctattgaaaagtgttgatttaccaacattgggttgaccaacaattgcaacaactggtaaaaccatttctcgccctcctttactaatctaaacataaataaaaaagccgactcaagtcggcttttttataaaatgactacttacggtcctttaattggtcaccaatgatgtcacctaatgcaaagccgttgtcgttatcactcatgtacttcttgtttactgaattttcgttacgtgaacgacgtggacgagaattatgattttctgaagaagcatttgagtcagcagccttgattgaaagtgagattcttctatcacttgggtcaatgttcaaaaccttaaccttaacactttgaccaacctttaaaacatcgcttggcttgtcaacatgcttgtttgagatttctgaaacgtgtaccaaaccttgaataccatcagcaacttcaacgaaagcaccaaagttagttaatgactttacttcaccttcaaaaatatcgccttcgtttaagtcagctgtagcttgttcaaatggagaaggttcagtttgcttaatagacagggaaatacgatgtctgtcattgtcgataccaatgaccttaaccttaacatcttgaccaacctttaaaacatcgcttggcttgtcaacgtgcttgtaagaaatttctgaaatatgaactaaaccgtcaacaccaccaacatcgatgaatgcaccgaagttagtcaaacgtgaaaccttaccttcaacaacgtcaccaacaactaattgtgatgcaaccttgtcaaatgcttcttcacgttcttcttcaactaaatccttgtgtgaaaggattaagcggttcttgttaggatcaatttcggtaatcttaagtttcatagtcttaccaatgtaaggcttaagatctgaaacgtaacggtttgaaattaatgaagctggtaagaaaccacgtgtaccaacatcaacaattaaaccaccacgaactgatgaagttacagtaccttcgacagcatttccgtcttcgaagtctttttgtaacttgtcgtaggcttctctttcctttaagcgggtaactgagaagaagaattcaccattttccttgtcgccaccggctcttcttaatactaaggccttaaacttgtcaccaggcttaactaaatcacgtaagtctgcgttacggtctgaagtgtattcacgacgagtaatgacaccttcaacaccagcgttttcaacaccaacatcgatttggccgtcttcaatgtctaatacttcgacatcgacaatatctccgacctcaactccttgcatttgctttaatgcgtctaaaaattgattactgttttctgacatatgtacctcccaatatcatgtcccattttataggaaaccgagatatttttctactattttgtgctattttttctaatttttttgttttttttcgatttgagctaaaattgcctctacaacttcgtcaatcgacatgtttgtggtgtcaatttcaattgcatcatctgccttttttagcggtgaaattttgcggtgagaatctttataatctcttgctgcaatatctttttcaatttcatcaactgtttggtcagatttaataccacgctctttaaaatctaataaacgacgttcagcacgtgatcttgctgaagcaactaaaaagatcttaacttcagcgttaggtaaaacagtcgtaccaatatcgcgaccatccataatgacatttgtcttgcctgccatttcacgttgcagacttaccattttttctcgtactttcggcaaagcggatacttccgaaacattagctgaaatttcaggcgttctaatttctttagaaacgtcctttccagctacatatactttttgctcaccattttcagatttcaattcaattccatcttcatcaatggcattcaagatacccgcttcatcaccataatctaagttatgattacgagcaatcactgtacatgcacgatacattgcccctgtgtctatatagacaaaggataatttacttgcaatgattttagcaactgtacttttacctgctgatgcaggaccatctactgctacttgcattctaataaaaaagagatcttatcatcgaccccttttatcctttctgaaagattatttcaacttaagtgtctgacctgcttcaatatttgaagagtctttaagattatttaatctggctaattcatcaacagtcaagccattcttttctgcaatttcatttaaagtatctccactttggactaaataagtcttaggagtagcagaactactagatgagcttgaactagccttttcagactttttcttgctaaaagaagatgatgaggttttcttagtcttaacagacttggatgatttagaagaaaccttcttaactgtttgaacttcttcagctttttctgaatggcttgaagccaaacgatgaacaactgggataagtgcaattaaaataaccgctaaaattataataactgctatccaacgtgctgatccactaggctgactatcttgtgagcttcgcttttcagtaggtcgttcatagtgctgatatggcccggttgactttttatccatcaaaaattcctccattcacttaacggattaattttagcatattttaggatgctttgaatatgaaaaatcccatcaacttaaaaaattgatgggatgataacttaattcaaattaaatctcttacgaacgaatggcttaattgttttcaaggtagcttcaaacaataagtaaacagccacagcgttaattaatccttttaacaagttaaagggcatgataatactaaaaatgtaggttgacattgatggtaaatgcaataactgacccaagtaaactttctcagtaaagcttaacaaggcactatagctattaatagcaggcaagtttggtaccgctgttactgcgtaaataggagtcaaaacgaaggcattagccaatgacatcactgctgccattgcgataatcccaattaccaaaccacaaattggtttaactctgcccatcattgtcttgcggttatccgcactcacatttttacttaataaataaaatggaactgcaaatgacattgaagctaagaatgctgctagatttccaacaagacttggtaatgcaaaaccactaaaaattaaactaagcaacattcgaattaaagcaataataactcccggtacaatgccaaaaataaacattccaattgtaataatgacatctgaaaaatcaaactttaagaaggcaactccaggcatgattggaaattcaaatttcataactacaaaagcaatacagccaattaaagcatatgcaatcacattagttaaactactattcttggatttagcttgatccataacttactttcttttcccaaaacaaaaggtctattgcttcagcaacagaccttaaaaagtgtagtaagtttttttagcctgtcttcttccatctagactttaactatcggtatctaacgattcaaccactgacgtgggtcgcggactttcaccgccggtcgggactttcaccctgccctgaagacaataaccttgaatatttaattacagttataatttagttcaattgcattaatttgtcaacttcatgcttcgataattcccgatattgccctgatgtaagcgaatccagagttaaaaaggcatatttttcacgagcaagcttatcaactaagtgacctactgctttaaacattcgcttaacttgatgataatgtccctcatgaattgtaatttggacaatttgtgtgtctttcttatgatcagttttcaatactttgaccttggcaggcgcagccttaaaatgatccaactttactccttgagtcaaggttttaatttcatcaggagttaaaatccctttaatcttggctacatagaccttagccacttcatttttaggatgcatcaataaatttgctaatttgccatcgttagtcattagcaataaacctgacgtatcataatctaatcttcctactggatacaaacgatatggtaaatcttcgaaataatcaactacagtttttctaccacgatcgtcttctgcagtcgaaacaacgccgcgaggcttataaaacaaatacgtgtgtaggctttcccgctcaattggttcatcatcgactgtaatattactaaaagtatcgactttagtacctagcttagtaacaacatgcccatctactttaactcgaccggctacaatcattttttcagcttttcttcttgaagcgattcctgcttccgcaattactttttgtaatcgttctgccattttctatccctctttttctaaatgtttgtctgcgctaccttttgaatcgaataagtcaatctcctcaccatcagttgtatcctcaaagtcttcgattaacggtaaatcagccaaactttgataattaaaatattgtaaaaaataatcagttgtaacatacaacttaggatgacctggagcatcttttttgccgtcttgtttaattaatcctcgccaaatcaatgtctgtaaagctcctgatgaatttactccacgaatatcatcaatttctattctagtaattggttgtcgataagcaataattgagagaatttcaagtgctgattgactcaaattcttagttaaatctttttgaaaatacttttcaattatcttagctgtctgttggctagttgtcatcttataagtatttgcaatatgaattatttgcatccccgagtctggatcagccttcattttttgctgcaaacgagtgactaactgacctagctcttcaccatcaacttcaagtagttcaattagattttgctcctcaagcccattgtcacctgcgacatacaaaagagcttctaaatttgctagtttacttgccattcgtatcaattctttctaaatttaaatcaccgaattcacgtgcttgtgtaatctgaattaattgttttttacacaattctagtgtcgctaaaaataagccaataacatctgagatattctgcattttgtccgcgcaagcaaagaaactaacttgcctttttcgtttcaattgtccatgcaaaaaatccatcatctcattgatcggcgtttctgctactctaattgaagcggtatctggttgctgcaacttcaaacgatgtaagaccatcgtaaaagtcgtcgctaattcttgtgcagttatctgacccttaggcagcggttgaactttagcagtggttgatacactagcttctttagcaactgtaatcggtacttcttcattacgttctttaaaataagcagatattttcttaaacacagaatattgtaccaattgttgcactaattcgtctcttggatcttcatcaggttgaatatcatctacaaaatcgttttgaggcaacaaatactgtgatttaattcgcaataaagttgatgacatgacaaaatactcgcctgcaatttgtaaatttaagctttgcatttggcgcaagtattctaaatattgactagttatttgggcaattgggatatcataaatatcaattttttgcgattggatcaaatgcagtaataaatcaagtggtccttcaaaattcggtaattctaaagttaagttacttttgtccattatcttcttctatcgtttttaataaatttgtatattctggtacagcagttattcgtttatctggatattcgtgctttagttcatcaacaattttccgttcataactaatctcacgaaaaccaggagctaaagacaaatatctaataattacaaactgattagatacttgggttcctattacgcccaccatattattttgactattacgataaagatacaaaataaagtcattttcatcctgattaagcgtgatttcttcttttaagttttcgatatttttaaaatcaggtaaataggatagtaatcccattgctatcttctcataatcttttttatattgtattagcatttaatcacctaaagacgaggatgtgtcttctgataaacatttaaaatttgcttttgtgataaattggtatagatctgtgtcgtgctaatatcagaatgtcctaatatttcttgcactactcgcaaatctgcgccgttttctagcaaatgtgttgcaaacgtatgacgtaaagtgtgtggcgtgacatctttagtaattgccgccatttgacaatactttttgatcatctgccaaatagcctgtcgtgtaatcttttttcctcgattatttaaaaaaatatgttcatcgcttttccctacttgtaaaattagcggatcacgaacttcattttcatatttttttatccaatcaagagcaacaggactaattggaatcaatcgttctttttcgcctttaccaagaacccgaactaagcctaaatcgtcatgtaaatcctgcaactccaaattaattaattcgcttactctcattcccgtggcatataatgtctctaagatagcacgatcacgtatacctaactttcgtttagtatttggctgctcaagtagcctattcatttcagcttgagagagagctgtcggcaaacgacgttcttttttaggcaaatcgatttccaacattggatttaacttttgaatattttgccgagctaaccattgataaaatttacgcatgctagaaataagtcgactaattgagctggttgctttgttcaaatcacgctgccgagctaaaaacgcatccacatcgcttgcttcagttggccatgaagccataccttcattttctacaaaagtttgaaattcttctaaatcttgacgataagcattaattgtattatcacttaatcctcgttcaacttgactatagcgtaaataatcatcaatttgatcttttaaattaatcttctccattatcgttctcttctggatccttaattaaagtaatcgtacctgctgttttatcttcttcaattaatccagccttgagcaaatgaccgaccgcacgtttaaaagctgattttgaaataccaaagtatgatttaatttcttgtgcacttgatttgtcatagaaaggtagagtcttggtttctcttctccgcaaactcatcaaaatcatttgcgcatcatcatcaatttcttcaaaagcacgaggcaaagcactcaaattcaaacgtccatattgactgacaccgactactctacccttgaattgctcacctagtctcataggacgtggcatctgcgattcatgtacaaagccaagataataatcactagttaaaacaaatgctcctatctctcgtgtaacataaaccgttgcaaagacattttcattattcattccacgtggaaagttagcagctaattggtcaaaaatattttcatctgctagcttagcccaaatacgatctttttcgtcagtttctaatcttactaaaagtcgatcatcacgtcgaggccatctttctttttctctaggaagatcatccattgataaaacaacgtctttatcaggtagacctacatcaacaaagacgcctaagcctggacgtacctcggttacttttccccaaccatattgatcgggttgcgcgaatggcaaaaattgtgtcatttctcgatcatgacttttattatcataaataaaaccttcgacttcatctccaattttaggaatatcatcttgcgtaatctcgatcttcttcaattcataagtcagtccatcaatttgaacataataagctttatcgttttcgtcagtaatttttcctttacgaactgttccaagcatttaaaaatctcctactttacatattcttacatataagtataagagatttttatgcaaaataaaatagccagcacttaagctggctattttttgattagctaatctatctaaattatattcttaaaattaaaggtttgagattttgccttggtagatagcaccacgacgagcgtcaacagtaatagttgaaccatcagaaatcttgtcagtagcgtcagtagcaccaacaataactgggatacctaatgataaaccgataactgcggcatgtgaagttaaacctgaagcttctacaactaagcctgaagctttcttgatagctgggttgtagtctgggtcagtagtcttagcaactaagatgtcgccttccttaaccttgctatttgcttcttcagctgagttagctacaacagccttgccgataactgaaccgttaccaacacctaagccttgaactaacttgttaccgatgatttgtaacttcattaagttagttgtacctgagtcaccaagtggagtacctgcaacgataattacaaggtcgccatcctttacgtaacccttttccttagctaccttagcagccatttcaaacatgtcatcagttgacttaggcttttcagtcaatactggttgtacaccccaaacgatacccaatgagtgttgaaccttttcgtcaaaggtcatagcaataatgtcagcattgggacggtacttagaaatcatacgtgcagtgtaacctgagttagttgcagtaatgatagtcttaacacctaattcttgagcagtacgtacaactgattcaccgatagcttcagttacgtttgaacccttgtaagcttcgaatctttgaagagctaaagtattacgcttaagcatttgcttttcagtacgttcgtcaatttcagccatagccttaacagccttaactgggtaaagaccatttgctgattcacctgaaagcatagttgcgtcagtaccatcaagaacagcgttagcaacgtctgaaacttcggcacgagttggacgtgggttttcttgcattgagtcaagcatttgagtagcagtaataactggcttaccaagtgcgttagccttgcggattaggctcttttgtacaaatggaacttccataaatggaatttcaacacccatgtcaccacgagcaaccattaaaccatctgaaacttgcaaaatttcgtctgcgttgtcgataccttcttgagattcaatctttgggaagatcttaacgtagtctgcacctgcttcttcacaaagcttacggatgtctaagatatcttgagccttacgtgcaaatgaagcagtaatgaagttaataccatagttcaaaccaaacttaatgtcatcagtatccttttcagtaatacctggaaggcgaatttcaacaccaggagcgttaacacccttctttgaaccgattacaccagtgttttgagcttcacaaacaagttctctctttgagtcgtccttttccttgatcaaaaggtcaaccaaaccatcatcgattaatacgtgaccaccaacgtgggtatcatcgtataaaccgtcgtaggtaacgtggatcatgtccttgttacccttcttagtggcatccattgatacacggatcatgtcaccagtattaatagtgaacttgccaccttcttgttcagtggttctgatttcagcacccttagtgtcaaggtcgataccaagaagtaaaccagtatccttttccacttgacgaaccatcttcatacgagcaaggtgttctgggtggtcaccgtgtgagaagttgaaacggaatacgtttgcaccagccttagctaaagcagtaatagtttcaatatcgtttgaagctggccctaaagtactaacaatcttagttttcttcattattaaaaaaatcctctccaaaaatcaactaaattaatatttagtcatttcttcatttacatccaataacgcataatcaccttggtgtttaccgtcaaacaaatcaagaatgtcgtgggtattaagttcaccattctccatgccgacagctaaaccgcccttcccatcgagaagtaacttaacagcataattacccatcttagtagcattaactctatctgtaacagtaggtgagccaccacgttgcatatgcgcaaggacattagcacgagcatcaaagtcaccatatttaaggagttcgtccttaaacttatcagcagccataacgccttctgctaaaacaatgataccatgatctttgccatctgcaaaaccacgagtaagagtttctgcaatttccttaacatcgtatgaacgttcaggaattacaattgcgtctgctccacttgctacaccgacacgcatagcgatatcaccacattcacgacccattacattaacaacgaatacgcggtggtgactgcttgcagtatcacgaattttatcgatagcatccatagcagtacgacaagcagaatcaaagccgatcgtgtagtcagtataaggaatatcattatcgatagttcctggtaaaccaactgagtttacgccgtggcgagtcaaggctaaagcaccatggtatgaaccgtcaccgccaattacgataaccgcatcaataccgtgtttctttaattgctcaacacccttttgttgcacttcttcttgtgcaaattcagggaaacgagcactgtacaagaaagtaccgccttcactaatcttgtggtcaacattttccgtggtaagcggaacaaagtcacctgcaaccaaaccagcgaaaccataacgaattccaaagacttcaagcccatgatggatagcagtcttcgtcacagctctaattgctgcattcataccaggggcgtctccgccactagttaaaataccaatccgtttcatgaattcacctcatcatgattattttgtgtaatttctcacatcacataaatattaacattttttaggcaaaaaagctcacaaaaattgggctaatttatgctttctttccgtatttaagtttgttagcgagactgtaaaatagtttgtgtaaggatgaatgattccttaaatttatttctttaaacattagaaaaaggagttcctttctcgtatgattggtttgaacaaaaaaacacatacagaaagaagaactccttcatgaatgattttaccaaagattttgctcaagctctattcaatccagacaaaataaatgatttattgcgcaaagagctacaacaggctgttaataacttgttagaagctgaattgactgcctttctgggctatgatccctatgccagaaatggctggaatactggcaactctagaaatggtgcttatttccgcaaagttgatacgcaatttggcccaattgaagtgcaagtgccccgggatcgcaacggtcaatttcatcagcacacgctgcctgactacaagcagcactcggatatcttggaaagcatgattatcaagctttactccaagggcgtgaccaccagggaaatagccgatctaattgaaaagatgtatggcagccattacagtccagctcaggtatcaaatatttccaagcagatgctccccaaggttgaggcttaccacaaacgcaagctaagcgacaagtttttctgcgtctatttggatgcgacataccttcctttgcgccgagaaacatttgagcgtgaagcagtctatattgccattggcatcaagcctaatgggcacaaggaggtcattgactactgcattgcgcctagcgagaacattgaagtctggacagatatgcttcaaaacatgaaatcccgaggcttaaagcaagttgagctttttctttctgatggtgttgttggcatgaaaacagccttggccaggacttatcctaaagctcattttcaacgctgtttggttcatgtcatgcgcaatatctgcgctaaagtacgcgtcgacgatcgtgaaaagatcatgaacgaattcaaacaggtgcatcaacagacaaacaaagaagaagccacagctgtcctgcatgacttctataccaaatggggcaaggtttacagctatgttatcagaagcttgaaagacatagaaccagatctgctggtcttttataactatcccaagcagatcagagcttcaatttattcgactaacatgattgaatcatttaacaatgtgatcaagcgcaaagctaagcctaaggcagagtttccaactgaacagtcgcttgatgcttttattggcattcaggcaatgagctacaatgaccgttatttcaatcgaattcataaatgctttggtcaggttcaggacaccttagaatcctactttgattaaataaataattaaaaaatcaatttacgagaaagatctatttacacaaaagatttgacagtttcttgttagcacttacatccatcgtcaaagatagctttgtaatttgaactttattctttaaaattaacttttcgcaaattggttaagaaatactgttttttattttggtcaaatcgatcaccttgaaccttgactcctagtaaataaatatctccttcttttaaaatagagccaaatttttcataagccggtggaaaaataataatttcttgttcgctagatgtatcagcaaaactagcaaaagccattgtttttccatttttggtcctaatttgctttaacttcattaatttacccacgctaataccactatcatttaactgaaattgattcaatggtctagcgttaaatttttgtgcatatttttgtacagctattagaggagtagttgttgtagtaaagcctaaagctttctcttccatttctgctttttgggcagcagtcggtggctcagcaggcttaagtggtgcatcccccagaatctcagataaagacatattttgtcccgttaattgcacattagcaattacatctttgcagttaagcaataactcattgcgattatcttcgattgagtcaaatgctccagccataatcaatgcttcaattgcgtctacttgtaagaacttagcatcgattctacgcaaaaaatcattaaaagacttatacggtttagtattggcagctatttccttagcaaaatcaagacgtaatcctttaattgcttttaaaccaactaaaatcttgccatcttgtaaagtatagtctaattggctgtgattgatatcaggcggcaaaatacgaactccagcttcctgagcttgcatcgaatagctttgcgctttagcagacgttgatgaattgagcatcgctgtgtaaaatgcagcaggataatgaaccttcaaataagctagccaaaaggcaatcttggtatatgccaccgcgtgtgaacggttaaaaccatagttagcaaattgctctatataatgataaactcgctcacctacttctttaggatgaccttttttgaccgtaccagcaataaattttccacgttcttgctcaatgacattctgattctttttagacatcgcacgtcgtaaaatatcggcttcacccaatgaaaatcctgccaggatttgagctgtttgcatgacttgttcctgataaaccaaaattccataagttgattgtaaaatttgctttaaactgggatcaggataatgcacagtagccgtaccattttttcttgcaacaaatgcgtcaatattttgcattggacctggacggtataaagcgttcaccgctactaggtcctcaaaattgtcgggatgcaatttacgcaaaacaccacgaatcccaccagattcaaattggaagactgcatctgttttaccttgttgaaacagttccattgttttgggatcatttaacggaattgtattaggatctagctttacaccttgctgccgcactaaagctaaaatattgcctaaaactgtcaaattgcgcaatcccaaaaagtcgatctttagcaaacctaatgattcaacatattttttggtttgctgagttacaggaatgccgaaaggaccagcctgcaatcccgaaatgccagcaatcgaatcatcactaatcaccaatccagccgcatgaatagaataatgccttggcaatccctcaagtcctaaagcagtcttaaataacaatttattctcaggcgttgcatcaaccaataatcttagttctctagactcttgatatgctttttttaatcccattttatctttagagtacgggattgcgtgagtccacttagtgatttctggtcctgttaagccaaaaacccggccaacgtctcttaatacttgtttagcagccattgtaccaaaagtcaaaatttgagcagcatgatccatgccatacttttgatacatatacttaattactgtattccgttgaatatcaggaatgtccagatcaatatcaggcatctcatgacgagccggatttaaaaaacgctcaaacagtaaattatattggatgggatcaacttcagtgatacgcaaagagtatgaaaccagtgaaccacaagctgaaccacgtcctggaccagtagtaatttttactcggtgacaatagttaattacatcccatacaatcaaaaaataatcatcgaaccccatctgattgatgactcgtaattcataatttaatcttttctgatactcggctggaatacttttttgaccaaagcgcgcttgtaaaccagtttgagccaaataacgcaaatattcttctgaagtcggaaacttatcttgatgatatttaggtaagaccggtttttgaaagatcacttcagcattacatttctgagcaattttccaagtattattaattgcatcatccaagtcatattgatgatagcgttctaaaacattttgtgcagaatctaaataatgcgaaccagcttgcttagctagtggcaatatatcttgcaatttatctcccttagcaatcgcacgcaaagttttttgtaaaaattgctcacgtggccgtaaatattgactatcttccactgcaactaaagataattcaaattgcttagctaatccacggacataatcaatgtaatctatacttgcttttgaagcatatacacccaaataaagatcaaacgttaacttctttagttggcgaacataatcactgcctaatgcctgatttgtatcatgcagcgccattaattcactttttagattagctggtacgataatcaacaaatcatctaaatatttggttaattcattcagcgttaagaccttatcgttttgcccattttccgttaacaaatttaccgcgctagaaagtcgcaataaattatgatagcccttatttgttttggcaaaaactagcaaatcatatttttgggtgctatcaaccaaaccatttaaacgcagttgcatcccaagaagtggtttaattcccgcctttttagccaactcataaaaattgaccaaaccataagtcacgttcacgtcggctaaaccaaccacaggatagcccttctctttagcgtcttttatcaaatcacttaccttggttggactacttaaaagcgtaaaggagcttatgttttgaagtgctgctacttgcataaattaaccacctttcgtcattacaaacattaaattaagtataccaaattgaaccaatcaggtttgaatttgcgcttcatttttgataaaatcttacacgaaagaaggaatcattatgggtcgttatatcatcacaactgtatggagcgtaatctacatgttagttgtaggctttattgctggtcctttaacccgaagtgcttcattcaacggcacagatttaagaaattgtgtaatcgttgggatcatttttggtattcttttctcagcaattattgcgactattactgctcgttcacacaaagataatagtaaatacagtaagttaaaataattattcaatctattcaaaaaagacgtgagatgtttttattctcacgtctttttcgtttggtttagtaaaacttataattcttttttgtatctacttcgactggtccatgagtcaaatattcgctaaacatttgtacatagtccttatccaaagtggtttcaattttgtccatactatattcaggataaaatcccccacccatagcacgatagttgttaactgctaaatgataaatctgatcatctttgattggcttaccgtgcaaagttagtttagtcagccgttcacctactggtctggataaatccgcttcatattcgactggataaaagacgtcaaaatgatacaacattggcttaggcttaatccatcgatcaataaagccaatgtttcctgcttcatctttcttcaaaaagccagcagagtgctcaataatatgacgtaattctttaccagtcagcttcacacgacacaactgattagcatacggataatttaacaaaacatctctcatagtaatggtcttatcaaatcccttagcagtctcactcatcactgcagttgccgaaacatcagctttagtaaaccataattgcatttgctggattaaattaataaatggcgcgccttctattctgcctttcattgcattttcaattcgagcaggtttatctaaatgtgcaattggttgatctagccatttttgtgttcttttatccaagtcagatacaatatcaacaattacaggatcaggatcataatctttagtgtcaatcaacttagtggacattgatttgattttcttagtatcatcatcaatatcaagaaccacttcagctacagcttcaccgcgataacctggttgaacaatagcagtatcgcgtgtaaccaaatttaagcgccgatgctggtgacctgtcaataggacatcaacttctggaattttggttaaaatctgataaccttcattttcaccacgattaggttcagtcgccttaccagtttcaggatcactttcaaagccaccatgatacatcacagctaaaatatcaacctgagggcgtaatattttggcataatgcttaattttttcgtaagcagaggcaaactttaagccttttacattttctttaggttcccaatgtgggatatattgcgttgtaatccccaataaaccaatctttaagccatttctcttgataatagtgtattctctaccaaaaaatggaacttctgtttctgcatccagtacattatcattaatgattggtgcctcattgttatcaacatagtagcttaaataatctaatccaaagttaaaatcatggttacctaaacagcgagcatcataccccactgcattataagcttgcgtaaaaatacgtaaatcactataatcgccagttgaatgagcataggaagcaagtggtgagccttgcaaacaatcacctgcatcggtaactacaacattgttatcaccatactttttcttttcagatttaataactgagctaactctactcaaactaaaaggagcatgatagtcggttttattttggtaatcagttggcaataaaaatccatgtgtatcactagaatgtaaaaatactaacttcattatttctttttcctttttctaggcataaaaaaagacaccatatcaaaggtgtcctttaactagttattgctgttgtcgttgttatttacaacttgacgacccttgtaataaccctttggtgaaacacggtggcttaagcggtattcaccagtagttgcatcatagtgcattgctggaacactcaacttaatgtgaccacgacgtgaacgtttcttttgtttagaagtatgtcttgcaggaactgccatttaatttgatctcctttattgtagtcttaagcttcagggtcatataaccccgaatcactcacgtagttcaatcatactattcaattgctaataaatcaagatttattctattttcttctcttttttattgaagaaagtgaccttgtgatccgttttttccttagtatctcgtccaaagaaccaagcaataatcatcccgataatcaccattaccactaacacaacaattagtggtaacctcaccttaaaaaagccaaaattaattgcgacaggtgatgtatttaaaacaacaaaaattactgcaattaaagccacaactgatccaataattaaatttctttgtttttccatctttttttactttctagaagcaaactttaaggaaatcttatcaccaatcgatggaaatagattatacaatttagccgctacagctaaactaagtggtaaatttaattcacgtttatcactgccaaagaagtgaactacttgccaagcaacatcatctggatccaacataaattcttgaacatttttgacataatttccagtcttatctgctacattaaggaaattagtataaactggtcctgggtttacagtcattaccttgacaccaaatggctttaattctagccgtaagacatttgaaaattgaattacggcagccttagatgaactgtaagcggctgacttggtagttggtaccttgccagcaattgagccaaaattaataatttgaccagtcttttgttccatcatgaccctacctactaaacgagtaaagtacatcaaacctaaaacattaacttggaacatattggtaacgtcttgcattttttggtccataaattcttcgaatttaccaaaaccagcacaattaactaaaaagtcaatgtgttttacttgtttagtaattgcattaaaggtttgttcaatttcttccggcttacccatatctgttggaaaaacatatgcttcagcaccggatagttctttagcttctgctgcaatttcatctaattggtcctttcttctagcaattaaaattacagtagcaccacgaccagcactttcaagggcaatggaacgtccaatcccacttgaagcacctgtaattacaacaactttatttcttaatgagtctttcatttttctgagcctttcattggaatattaatctgatcaaaatcattaactaatactgtattagaaaatacttttttagcctgtttttcgagttttttccctttagcacccatataacgagcagaaatatgatttagacataataatttaacattatctttccgagcaattttggctgcttcaaccgaagtagaatgataataatcatgcgccaatttttgttcatcccctgcaaaagttgattcatggactaaaacatctgcatctttagccaaacgagcaatacttggcgtggaacgtgtgtcatagatgaccgtcacaattcttcccggtttagtaggtcctaagaaatttttaccatccaaaacagtaccatcagctaaagttactttttcgccattttttaatttccccaaaagtggcccattaggaacattatactgtgctaacttgtcaattaataattcgcctggatgtgaagcctccactactctaaaaccaaaactaggtatccggtggtctagttgctccgtatacactcgaaagcccttatcctcacagattaaccctgatttagctaattcaacaaaccttatagaatatgaaattttagtccgagataccttaagagctgttctaacaaattcttcaataccactgggaccataaatagtaataggaccaacatcaccttgaaaagaacgagttgacaataaccctggtaacccaaaaatgtgatcaccgtgattatgtgatataaaaattttggtaacttttcgtaatttaatatttgttcttaaaatttgatgctgagttgcttcacctacgtcaaaaagccagatttcattcaattcatccagcaacttaagtgcaacactagaaacattgcgttgctttgaaggttgcccagcaccagtacctaaaaattgtaattccatgaaaatcctattctaatctaaaattttgaatgcttaacaattgttttggtaactaatgcactatagtattttgagccctttaaattagggtgagtatgatcaccgtagaaccagtcaggatgattcttcgagtatgaataccaatcaattattataagattatgataccgttttgcaccttgatttagcaaattattcactgaattttgccaatctctagttggaacgtgaacattaatccagaaaacttttctcttaggtccagcctgatgcattattcgatcaagatcttccattgagaaaggtccattagttcctaaccctattaagatattatctgctaaaactccttgactttgataactatctaataagccaaaagcaacattcaattgtcttgaaacagcagcatcaattaacgctttaggcattaatcgttttaaatcgttgctcgaaccggccattaccgagtcgccaatcgcagttacttgaacatgttgagcaaattgcaaatctaactgggaaataccatatttaacaaaggatttgttaataggatgctttttagtttgaagctcagcttcacgaataattttagattttttttcttttttctttttttctttttttaacttttcaattaatttagcattatccgttttttgttttttagaattctgattaattcgctgtgctaattggcttttattaaagtcttctgcttttactcctggtgaaatagcaatagctgctgatcctaagattaaaatcaaagctgctaaggctgcttgacctttcttaaagtaatcttttgtttcaaaattaaaaattcgagcaaaatattgcttcgttttatcccaggtaatcctacccattggtctttcaatcaaacgataagtaatttctgtaatcactaaaattaaaatcacttcaataaggtgatacagcattggattatcaccaatatttaccttatcttcaaaaaagatcattactggaaattgatacagatagatgccataacttcgcgatccaatccaatcaaataacctattagttaggatttgattccaatgactaccaggatgagcaattaccgctactaaaatacatacatctaaagtaaataacaacatcccgccagagtaagtaaaggcttgttgtggattcatccacttagagaaaaacattgctaacattaaagcaaatgaagcaaggcccaccaagtccagtatccagcctacttttcgttcaacttgctgatttaaactctctatcggccaaacaactgctaatgctgctcctaatcctaaagaaaagaaacgagtatcagttccataataaattcgattaatatcagcctttaaaaagtataggattgccatttctaatgcagaaacagctgatagaccaactaaaatccagaaaatattttttttctttttaaccaatttaactagtaaataaatgacaattggccaaacaatataaaattggccttcaattgacatcgtccataaattagtaaatggtgattcattagctgcaaaacgctcaaaatagctttgaccattatgaatttgccaaaaattaaatacatttaatagatttgcaagtacaacctgatttaatttagccagtaaatttcgttgaaagataaagatataggctgcacttaaccataaaacagtaattaattgtggatataacttttttattcgactcaaataaaaatgacgattattatatgatcctgttttatcatatgaattaaacatatgatctgtcaccaaatatcctgagagcacgaaaaaaatcggcactcccagatatcctcccataaaggaattaggatccaaatgataaagaattactccgataactgctaaggctctaaggccagaataccccgtaataaacctattttttttcataccctatctctactcttattgtacgaattcaaagacaaacttgccaatagccacatcatcaccattaacagctcctttttcacgtagtgcgtcatcaacacctaaacgcttaagctttcttgctaaacgcataataccgtcttggtgatccaagttggtcatttgaactaatctttctaattgttcacccttaacgataaattcatgttcgccaacttgctcaactgtaaattcattcttttgtggtgcctgatacttatattctttaatcttttgtgctagcttaggttgttcttcagcctgttcttgttcaacttcagttactaagttggcagtatctgacatcaacttatctacgcctttatgagttacacttgagatctcataaataggttcattatttccttctgcttttaatgcttttttaaactcagctagtttttcctcagcaccaggaatatccatttgtgaagctacaatcaattctcgcttctttgataaatctgtttcgtaatttttgagttcttttttaatggtatggtaatcatcaattgcctcacgaccattattaggatccattgaaactagatgtagaattactttggttctttcaacgtgacgtaaaaattgaattcccaagcctacgccttgactagctccttcaattaatcctggcaaatccgccattgaaaagtcacgaccatctggcaagataaccattcccaaattaggagttaaagtcgtgaattgataagcagcaattttgggcttggccttagttgttactgataacagtgttgatttaccaactgacggaaaaccaactaagccgacatcagccaataattttaattctaagcgcaaaacgcgatcttcacctggttcaccattttcagcaatttctggtgcagtattaacactagttgcaaaatggatattaccgcgaccgccgcgaccacctttagcaacgactagttcttggcccttttcagttaaatcaccaatcaattcattagtgtcataatcatatacagtagtaccaactggaacttttaaataaagatccttagctgcacggccatattgtgatttaatacgaccattttcaccactatccgccttaaacttacgccgatagcgaaaatccatcaaagttcttaagccgctgtcagcaacaaaaataatactgccgccacggccaccatcaccaccggctggaccgccattagggacgtatttttcatggcggaaagccaccatgccatcgccgccttttccggcttgtacttcgattttagtttgatcaacaaatgtaggcatgtatatctcttccttccgtcttaatctagcttttaatactataccacagaaatacgcatgatatcgcgttttctcggattacaatgttaattttaccgtttgtgcttgagtaagcgttaatcctgctctacgcaagtcatcaattgaagcttctttaattttcttcaatgaaccaaattcgcgcaataatttgttacgacttttaggaccaattcccttaatcgaatctaaacgactggacaaagcatttttagcatggcgtcttctatgaaaagtaatcgcaaagcggtgcacttcgtcttgaacgcgcgtcattaaataaaagccctctgatttgggattaaggggaatcagtttcaaaggaataccgttgatgggatcgccaaataataaatggtttgttctgtgcttatcatctttaaccatccccgcaactgggatattcaaatttaattcatttcgtaaaacatctaaacaagcatcgacctgaatttgaccaccatccatcaaaatcaaatcaggcattcttttatgctcgcgcaacagtctaccatatcttcggcggacaacttccctcgtgttgcgtacttcgtcgccaccattttgatgttcaacctcaccttttagcttatatttacgataagctgttttttcgggttcaccatctttaaaaacgactaaagcagagactgggtcagcaccttgaatatgggagtgatcaaaactttcaataaagtgtccatatggtaagcctaaagcatcaaaaatttctttttgagcgcctttagtttttcgattacctagttctaataatctaaacttatcatctagctttaacttagcattatccttcgccatgtctagcaatgactttttctgccctcgttgcggtgttctaacaggtaccttcaaaacctcagctaaagtagcattatcaaatccttcaggaatcagaatttctttgggcaaaaccctatttctttgcccataaaattgcacaataaaggaagtgaaagcatcttctggatctgtggcatctgtcaaaggaaacattctggtttctctacgcaataactttgcttgccgtaaaaagaagatttgaacagaaatccaagacttgtcaacgtaataattaaaaatatcacgctgcgtattatcattggaaataattttttgtttttcaaccgtttcttcaatatatttcaattggtcgcgaatttcggctgctcgttcaaattcaagattgctagctgcttgagccattttttcggtcaaactctgcttaacactagcaatatctccattcaaaaagctcttgatctttttaatttgctcttcgtattctttttgtggcacttttttaaagcatgcacctaagcactgccccatatgatagtaaagacaaggtctgccttgataaccatgacagcgccttagtggaaaaactttttgaataaacttcaaagtggcctgggcagcatatacattaggatagggaccaaaatagtagccaccatccttatgaacgatactagttaaccgagtttgcggatcatgttcacgcgtgatttctatgtaaggatatcccgtaccctgctttaattgaacattataataaggttgatacttttttattaatgtaatttcaagtaaaaaagcttccttatcagttgatacagtaatgatgtcataatctcgaatttcacgaactaattcagcacgacgtccaacctgtttactcttaaaatatgagcgaacccgattttttaaatttttagatttaccaacatatataaccgtaccgttaatatctttcatcaaataacagccgggtttttctggtaaaagttttagtttattctcaattaattgtgttgccattatctcatctcactgaaaaaatttgcatttaatagtttaacacagactgtttaagaagatcttaactttgcttatagaaatagctattcggtacaaaagttgatatattaaaagaaataaaatttgaggagaacttttgatgactaatctagtttttgacttaattaaccaatttggctacctagccatcagtttgctaattgcaatcgaaaacatctttccccctattccatccgaagtaattctatcgttcgctggctttgcaacccatcattctcaaatgaatgtcttcggtgtaattattgcttcaacaatcggcgcggtagttggtgcactagttttatattggattggcactttacttaatccagatcgattagaaaagttgttcgatcataagttattcaaactacttggctttaaaaagggtgatgtacaaaaggctatcagatggtttgataaatacggtaccggtgcaatcttctatggtcgctgcatccctgtagttcgtagcttaatttcaattccagctggaatagccaaagttaaattacctaatttccttatttacactagcttaggcagcttactctggaatgctattctagttggtcttggttcctatatgggtgaaaattgggaacaaattgtgttaatttttgaagaatactcattaattattggaggacttattctaattgctttaatatatttttcctgtaaatggtataagcaaaaaattaaagctgattaattcaagtgtctgggaaaaaactagcttccagatgaataaaaacgatcaagatttccttttttaagaatcttgatcgtttttttgttctctttaaaatttttaacaataaaaatcggcccttcagccaccttctttgacaatatttgttcaaattcatcatcataaaggcaattccgatatcggtttcgaccttctctttacctcgcaggtgcgttctgcgcatgccaaatacgttcttcaaatgtccgaaaactggctctacatcatattttctcatgccatagatgtgtctgccttcttcgctttggagaacttcttttgctttttcttttaaatattgccagttaggattatagcgaacttggcgctggcggccgctagctgttttagccaattgttccaattctggcgttagctggaactcgtctgcctcataaaccttaaaatcacggacctgaccagtagaacgatccttgcgctggctgtaatatttgaaattgaatctgacgccatgatgatcaatgtaataatcatctttttcattgtagtaccagttgattagcttagttggatcattcttatactttttggtctgttctttttcatacatagtgtagggaataaagtacttcttgtctggatatttttcctccagcatcgaataattgtattcactgccatagccagcatcggcgacgattttgtcaaacttgtccaacacggtcatttgatccaaaaccggctccaaagttttgaaatctgtcggattaggaaagatggcataatcaactacatattgatcggtcgtgactgcttgaatattgtagccaggctttaattgaccatttttcatgtggtcttccttcatatgcataaaggtggcgtcatgatctgttttggaataactgttgcgtccggcaaagatctcttcggcttcttcatatttttgcattcttggcacataatcttttcttagccggtgcagaatcttttttagtccacgtcgcttggcttttcgaggtgaaccgccaggaatggctttgttttcctgctcaatctctttagtcagcttgttaatttctgcttcagtttcttgagctaattcctttagcccctgactagtttgaactttttctttttccatttctttgactacttctttagtaatcaattcatcataaagttcaactgcctggcctttcagcttttcatgatacttttcaaccgctttgcgccagacaaatgtatagcggttagcatcagcttcaatcttagtaccatcgataaaagcagcaccttcattgattaagccttcatcttctaacaggttagtgaagtagataaagctctttttaatcagttcattggcatggctgcttgatctaaaattattgatagtatgatatgaaatcttttgctggtcagccaagatcatcattggcagattttcttccagcatcaactcaatctttctgccagaaaaaactcttctggagtaagcaaaaagcagtattttgagcatcatggctggatgataggctgggcggcccgttttagcagtcttgcctactaaaacatcttctggaattgaatctacaaaccagctgatgacattagccaaatgattggccggaatggcaaaatctagattaagtgttaaagcagtttgacctgtgatataattcttgtacatgttagtttccaccttttttattttgtgatgatttaataatatcaaggctggagctaaaagtatacaaaaagagcgttgaaacaaaaattcaacgttcttttttcatgatctgagacttagttttttcccagacactttcttcttttaaaaattaaaaatatcatgtaaaattaatctaatctataataagggaagtttgcgaatgaaatttaatatttttaggaaacaaaatgttgagaactatctcggtaaagacattaagttctccaaaacaatgaacgccgttgatttaatgtctcttggcgtaggagctgtcatcgggaccggtattttcatcttacccggaactgttgcagccacattaactggacctggcgttagtttatcctttgttgttgcagcaattgtttgtgctttagctggaatgtgttatgcagaatttgcttcagcgatcccagtagctggttctgcctattcatatgggaatatcgtttatggcgaatttacaggctggattatcggttgggcactgattttggaatacatgctatctgtagccactgtggcagcaggttggtcatcatacttcagttctttcattgcaccatttggtctaaaaattccacacgctatttctggtcctatgaatcttaacaatggcgtttattttgacttggtttctgttttaatcattttacttatcagtatcctgttgtcacgagggatgaagaactcaattaaaattaatgtcgtagctgtttttattaaaatcgccattattttaatttttatttttgtaggcttacagttcattaaacctaacaactatcatccgttcttgccatatcatttttcaggagtcatcaaaggagcaaccacagtcttctttgcctttcttggctttgatgttgtttcatcatcagccgccgaggttaaaaatcctaagaaaaatatgcccctaggaattattggcactttagctattgcagctgtactttattttggcgtttcaatcgttttaacgggtatggttaattataccaagctaaacgtatctaatcccgttgcttttgcattgcaatatgttcatcaaaactgggtagcagagttattatcatttggtgctatgctaggaatggctaccatgatgctgacaatgatctattcaagctctcgcttaatctatgctatggcacgtgatgggctattgcctagtgcattcagtaaattagataaaaaacataactctcctcaaaatgccttagtcgctgtcactattattattgcagcaggtgcagcattcttctccgttgatcaactagccaatttggtcaactttggtacactttttgcctttactcttgtttcctttggaattctaaaattaagaaaaagaacagatattgttaacgatggctttaaagttcccggatacccatatttgccaatcatttctggtttaatttgtatctttatgatttgccatttaagttcagaagtttacttaatggcagctatttggttaatcatcggtgctgtaatttactttatttatggctaccaccatagtcagcttgatcatgattaacatcagtaaaaattatgtaaagaaaaagacgattcgcatgaatcgtcttttttagctctgtttgaactagttaatttgattaattgcctgaccatctttaaagaaagacaaaacattattcgcagcttctttagacaaattaaatctagcaatgtgagtagctgaaccaacgtgaggcgtcatgatcacattatccatttcaaccaattcaggtcttggatgtggttcgttttcgaaaacatctaaggcggcgcctgcaattgaaccattctttaacgcagcaattaatgcatccccgtcaatcaacgatccacgagcaacattaattaaaaacgctgtgtctttcattttctttaaaaagtctgaattaaccagatgatatgtttcagctgtagcaggagtatgtaaactcacaaaatcagcttcttttgccaaagtatctaagtcaacatatttagcatctaattctgctgcaatttgatcatctacttgatgacgattatgataaataattgtcataccaaatgctttagcgaacctagcaacttgttgaccaattcgacccatacctacaattcctaaggtctttccttcaatggagtacccttggttgtcgtactcatcggcatttaaaaagacgccttcacgcaaagcatcgtcataataatgcaatctacgagctgatgccataatcattgtccaggcaagttccgccgttggacgcaacacactcttagggcaatttgaaacaactattcctttttctttagcgtattcaacatcaacgtgatcaaagccaacgccataagttgaaattatttttaaatttttcgcagcatcaatcatttctcgatcaaaagccatctttgctacgatcacaccatcatattctgcaatatgatcaagcacccactcacgatcatcttctggtcgatgtcctactggaccgatatcaacttgacaaatattttttaaatcagttaaggcctcatctcttaagccacctaaaactaaaacttttgctttattcattatttttagacctctattcaattttcatcttaaagtaaaaataccactatttgaaagagaaaacatctactttaatattttattgattgcaactgcaacaccgtcgtggtcacaatcagccgtaacttcgtcagcatgttgctttgtatattcaacagcatttcccattgcgatacctaatccagcataagttaacatcggcatgtcgtttgcttgatcgcctagggccatcacattacttcgatctatttttaagtagtcacatagtcttttcaggccagtccccttatcgacaccggcagcggttgcttcataataaaaaggctcagtctttgaaaatacaactcgatctttcatcatttcaaataaaggagattctattttatcatctaaatagtctggatcatcaacatacatacatttgatgattggtatctgcttcatttcttcttgtgtacgatatgagacttctaattttacgacccgtgaattataaattgtataatgtcccaaatcacggctagctgtataaattcgatctaacgatacgctatgaaaatgtaagtttagctttcgcgcaattgtctctaaatctacataatcttcatattttagcccctgtttgaaaataacctgccccgcggttgattctacaactgcaccattaaaactaactacatactgattttcttggccattaagccctaattcatctaaataacgttgagtacctgacaaaggccgacctgtgcaaattacgatttgcttgccttgtttttgagcagtcaaaattgcttttttaactgctggtgtaatctccttcttagaattaactaaggttccatcaatatctatcgcgattagcttaatttcttccattaccttttcccttaaaacaaagaaagcaccgcttatgcgatgctcctattaaacagccatggtctgcgtattttcttttaacttgaccaaatcagccatatcatcagcactgatttcaaaatcgatgttcaagttttcctgcatttctttaacattatcattcttcggcaaaacaatacaacctagctgtaagtcaaatgctaacattaattgagctggactaacatgatacttttcagcgtaagtcctgattcttggatcctttaacaaacgaccatgtgcaagtggagaatatgctttaatctgaattcctaaatttttacattatttcatcaaatcagttggcacatttcctatatgaacttcgatttgattaactactggcttaattgagctgttattaacaatgttagctacgtcttcttgtaaaaaatttgaaacaccaattgatctaactttaccggctttaagtgcttcttccattgctctccagttttccagattgccttcaaagtgacgatcattaattctattcacttcaatccaaggttgtggtgaatgaattaacaacatatcaatatattccaaactaaatcgatctaaagcgtcatcaattgcttttttgtaccttcatagtctttaatcgaagttggtaatttagttgttaaaaaatatcactactctcaacatcagagttccaaataccttttcccacaccactttcattgccatagtctttagcagtgtcgaaagcgcggtaaccaacattaatcgcttgacgaattacttttcgtacatcatcgttattaattagccaagttcctagttgaattcgaggaacctctactccgttattgagcattaaagttttatcagagtacatatatacacctctacattttactaatatgtctctgtttcttaattcctgtatttatatagctaataacaattattaaacaataattgtttttttcagccatctgttaatagcatacaacaaaattgttgcaaatcctatacatacattttattttttgtggttctgttatattttctaattaaaatagtagcatcaatcaatgctgctaggtttataaagattatcaaataatttattttattattctatacaaaattaatattttcgtataaaaaaagaaagggctgatgatgtcctatcaactctttctcttcagtctcttaattcccaacacctataataccagcatttatcatttaaacaaggataaaaaacatcttttacttactaaatattatttttagttttcacattatagttttcatcacatttttaaaaagtctagatgttatattacaaaatgattacaagagcaatataaatcatatagttcactattagctatatgcaaatactatattttttgagcaataagctgcaacaatttttgagcaatctttcgcttactcattttaggccatttcttagttgacttatttttttgtaaaatcgttacctggtcttcatcattgccaaaaacatttttagaaacgtcatttgctacaatcatatcggcaccttttgaagatagcttttttgcagcattttgtagcaaattattcgtttctgccgcaaagccgacaactatctgccctcgctgcttgtggctagcaacttcgcgtaaaatatctgtcgttttaactaaagttagagtcaaagtttgttgatcagcttgcttttttaatttatgatctgcaacttgtttcatgcgccaatccgctactgcagcagccataattaaaacgttactatgcttaaattcttttttgactgcaactaacatttcttcgctactagaaacatgaattaatgtaatcctaggattttgtggcaaaggcatacttacattaccatatattagctttactttcgctcccatcgctgctgcttctgtagctaaggaaatgcccattttcccactagagcggttaccaataaagcggacgggatcgattgcttcttcagtaccaccagcagtaataacaatattttttccttgcaaaacgttctgttgttcagtgaaatttttgatccacgccacaattgctcctggctctggcattcgtcctttagcagcatagccttctgccagcatccctactgcaggctccattatttctacaccatgttctttcagaaaagctatatttcgctgtgtagctggattattccacatttggtcattcatggctggtacaaccaatttaggtgcacttgtagctaaaattgtagtgctagctgcatcgtcagcaattcccgttgccattttagcaataaaatttgcagtcgctggtaaaaccagagctaactctgtccaacgcgctagatgaacatgtggtatgctagcctcattttccttgctccataaatcatccaaaacaggatactttgttaaagctgccagtgtattagtagttacaaaatgctctgcatttttagtcattactatttgaacttgatgacccgctttttctaaatcgcggataacgttaactgccttataatcagcgattccacctgtcatataaattgttattcgactcattttaccattcctcgtcatctaaacttatttttattttatcattgtccacttaaatagtagacccggatttaaaattgaagtgcaacactaagtgttaaacaaaaaggccatgaagacctaaacttgaagtgacgaaaaatcaagaaaggaagatctttatgaccaattcaaattctagcatttctaagcactatcatcaattaaccagcgtacaacgtggacaaattcaagcaatgttggattccggcataacttcccgtactgttatcgctcaagaagtcggctgccataagtcgacaatcagtcgcgaaatcaaacgcggaagtgtcctgcaaagagacagcagctatttattgtatgagcactattacgctgatactgcacagatttattatgagaagcgtcgcaaaaactgctatcagcgcaatccattgaagcattatgctgtctttttgagaatgctctccagacgctttaaagctaaatttgatgccaccagcatcgatgaattcgttggtgaattcaaaaggactatgccaggctacccttgtcccagcacaccaactgtctatcgctatattgatcagggcttgctggacataagcaatattgatctgcctatgaagctcaaaagacgcaggaacaagcgtcatcacggccatagcggtcatgctttgcacaagaagcatcttggcaattccattgaacagcgtcctaaagagattgaagacagaaaaacgccgctgcactgggaaggagatctggttaaaggcgtcagacgcaagaatcagcctgctttaatgactttgaccgaaagaaccacacgctttgaagtagttatcaagattcctgactatcgggcaagcacatgccaaaggctgcttcaaaatgagattgacagacatcctgcctggtttaaatcgatcacgtttgacaatggctctgagtttgcggatatgaccgagatcaaaggctgccagatctacttcgcccacccatattctccatgggaaagaggcaccaatgagaactgcaatggacttctgcgtcaattcttccctaaaggcaaaagcatgaaagataagtcagctgcttatgttcaacaggcaactgatgccattaaccgcaaacatcgtcgaatccttcaatatcacacagcagaagaactcttcaagcaatatatttcctcatagcctaactgttgcacttaatttgacaattcaggcttaaatagtagaatattgtgttgggagttatatttggaggaaaaattgaaaaatatgcaaaaactacttttactaactatattcttacttagcttatcggcctgcactaaaccacaatcatcctctgtaccacgtgataaaagtgccactacaatcaagattgttgataggaagcttgagttgcatcagcccactaaaaggccacttcaacctttaaatggaattttgcctcattggctgcaaatgccagataaatctcagcctaagccagcaatttatactaatttgaatactgttcttaaaaacaaatagggaaatgattagtttcatcttccctatttttgagactgtaaaatagtttgtgtaaggatgaatgattccttaaatttatttctttaaacattagaaaaaggagttcctttctcgtatgattggtttgaacaaaaaaacacatacagaaagaagaactccttcatgaatgattttaccaaagattttgctcaagctctattcaatccagacaaaataaataatttattgcgcaaagagctacaacaggctgttaataacttgttagaagctgaattgactgcctttctgggctatgatccctatgccagaaatggctggaatactggcaactctagaaatggtgcttatttccgcaaagttgatacgcaatttggcccaattgaagtgcaagtgcctcgggatcgcaacggtcaatttcatcagcacacgctgcctgactacaagcagcactcggatatcttgtaaagcatgattatcaagctttactccaagggcgtgaccaccagggaaatagccgatctaattgaaaagatgtatggcagccattacagtccagctcaggtatcaaatatttccaagcagatgattccaaaggttgaggcttatcacaagcgcaagctaagcgacaagtttttctgcatctatttggatgcaacataccttcctttgcatcgagaaacatttgagcgtgaagcagtctatattgccattggcattaaacctaatggacataaggaagtcattgattactgcattgctcctagtgagaacattgaagtctggacagagatgcttcaaaacatgaagtccagaggcttgaagcaagttgaactctttctttctgatggtgttgttggcatgaaaacagccttggccaggacttatcctaaagctcattttcaacgctgcttggttcatgtcatgcgcaatatctgtgctaaagtccgggtggatgaccgcgaaaagatcatgaacgaattcaagcagatacatcaacagacaagccaaaaagaagctgcagctgtcttgcatgaattttatgcaaaatggaataaagcttatagccatgttatcaaaggtttgagggaaattgagcccgatctgctggtcttctacaattatcccaaacaaatcagagcttcaatttattcaaccaacatgattgaatcctttaacaacgtcatcaagcgtaaagctaagcctaaggcagaatttccaactgaacagtcgcttgatgcttttattggtattcaggcaatgagctacaatgaccgttatttcaatcgaattcataaaggctttggtcaggttcaggacaccttagaatcctactttgattaaataaataattaaaaaatcaatttacgagaaagaactatttacacaaaagatttgacagtttcctattttttgttcaatttacaagttgctttaaaaatagttgttttatattaatgagtaatttaaaatttatataatacagaaaggaactttatatatgccaaatttatccagtgatttaacttcaactattaatgagagactaaacaacttgaccgcatctaaaattcgagcatttgaccaaaaggtctctgaaatttctgggattattaagttaactattggtgaacctgatttagcgacacctgatcatattaaagatgccgcaattcgtgatattcaggctaatgattcccattatgctcctcaagctggtaagccagaactacttgaagctattagcaattaccttgaccgctcaattggtgtacattatgatccaaaaagtgaaatctgtgtcactgtcggtgcaacaggtgcattaaatgatgtctttatgaccttgcttaaccccggtgacaaaattttggttcctactccggtttgggctttatactttcagctaattaaaatgactggagcaatccctattcaagtcgatactaaaaaagatgacttcatcttaacagctgaacatttacgtcatgttctcaatggtcgcggtaaaggtgcaaaggcaattattttaactgatccttctaatccaactggccgcgtttattctgccacagctctaaaagccttagcagatgtcattaaggaatacaaaatcttttctgtaactgatgaaatttatgcagaacttgtttatggcaaagccaaacatcactcactttctgaatacatccctgacagaaatattttgatttccggtttatccaaggcttatgctatgactggctggcgtttaggctatattgctgcccctaaacaaatcatgaagagcatccgcaagattaattcatttttagttacttcagttactgataacgttcaaatagctgctgtcgaagccttaaacaatggtcaaaacgatcctaaaaaagcacgtgaaatctacgaagcacgtttaaactttatgcaatctggcttagaaaagttgggctttgaaatggccacaccgcaaggagcattctacatttttgctaagatccccgaaaaatatggcaccaatgatgaacaattcgcttttgagctggctcaaaaagcaaaagtcggtgtcactcctggtcgctactttggcaagggcggtgaaggttatgtccgtctttcttatgcatcatcaactgagcaattaaaagaaagtttagctcggattagtaatttcgttaataatttataattcagataaaaaaataagtgatctcaattaaagcgagatcacttattttttattatattgatttattacttatcccaagttgaattttctgcagcatcttcagcagccatcttttcaagacgctcttcggttgcctttacactgtcttggtacttttcctcaacttcgatccccaagtcagctaattgttgatcagctactggagctggagcatgcatcattggttctgaagcagaagcattcttagggaatgctgaaacgtcacgaatattatccttatcagcaagcatcattgcaaatcgatcaagaccgatagctaaacctgcgtgaggtgggaagcccatgtccaaagcatccatcaagtaaccaaattgttcatatgcacgtttcttagtgaaaccaagtgccttaaacatattttcttgaattgagcgcttgtggatacggattgagccaccgcccatctcatcaccattcataacaatatcataactacgtgcgtgagccttatgaggttcagtagttagcaacttaaccccttcatcatctggcatagtgaatgggtggtgagctgctacccaacggccaagtccttcatcgtattcaaataatggccaatcaacaacccaaacaaagtcataaacacccttaggaacaataccagtttctttggcaaattcacgacgaaggtggtcaagtgaatcacaacataccttccacttatcagttacgaatactactaattcgccgccttcaagatcaaattccttcttcaaagcttctttgttctcatcagtcaagaagcgagcaacagggcctgaaaattcgccatcttcaaatttaacccaagccaaacctttagcgtggaaacgtttaataaagtcagccttcttgtcaatcttcttacgtgagtattcttttgcaccatttttaacagcaattcccttaacaaaaccgccatcagcaattgcaccggagaagaccttaaagtcactatccttgaaaattgggcttaagtcatgaatcaacataccgtaacgagtatctggtttgtcacagccatacttgttcattgaatcagtccaagtaattcgcttaattggagttttaagatcaatgcccttgacatctttcataattttcttcaaaagaccttcagtataactctgaatagtttcttcatcagcaaatgacatttccatatcaatttgagtaaattctggttggcggtcaccacgtaggtcttcatcacggaaacaacgagctaactggtaatacttgtcaaatcctgcacccattaaaagctgcttgaacagttgtggtgattgtggcaaagcgtagaaactacctggatagattcttgatggtactaagtagtcacgtgcaccttcaggtgatgacttacctaagattggagtttcaatatcaataaaaccattttcatcaaagaattcatgagtagcacgcaaaatctttgaacgtaaaataattgcttgttgaacttctggacggcgaagatcaagatagcgatactttaatctagtttgttctgagacttcaattccatctttaatttcaaatggagggttcttagccttgtttaaaataatgatttcagttgcatcaacttcaacttgaccagtcttcatgtcagggttaacttctgaacgcttaacaactttccccttaacttgaacaacatattcattaccaagtgaatcggcaatatccattaacttcttaccagaatctttgttaacaacgatctgaaccaagccttcacggtcacgcaaatcgatgaaaaccaagttacctaagttacgtacacgttgtacccaaccatagagatttacatcttgaccgatgtatttttcagtaatattgccacaataatctgttcttttttcgatcttttccattgttactagtccttcaattcatccattattttagtcatgttatttagatcttcaagacttaaatcgattgtcttgccatcagctaaacgtttaatattcaaaacgccgttagcgagttccttttcacctaaagtaataacatacttagcaccttcacgatctgccttcttgaattggttctttaacttcttctgattgacatcaaagtcagcttcaaaaccttgattacgaaggctacgtgcaatttcaattgccttttgtgcagtaccgtcaccaatattagtaataaagaaatcaataccgcgtttctcgaataatgcaggattttgcttttcaagcactaacatcaatctttcttcgccaatcccgaaaccaacggctggagtagcgggtccattgaattcttctaccaagtgatcatatctaccaccaccaagaatagtagttgcactttcccataagctcttatcttcaaccataaattcaaagataattccagtatagtaatcaagtccacgtactagatcatcatcaattacataatcaataccaagttgacctaacatcttcaagattgcgtcaaaattagcttttgaatcgtcatccaaaaattcacgaatcttaggtgccttaggcaagaacttcttatcacgttcatctttagaatctaaaatacgcaatggattatcacgcaatcttctttgtgagtcttctgataactcatctttcaaaggagtgaaataattaaccaaagcatcatgataatcttgacgtacttgctcattccccaaagtgttaatgtgaagttggtaattcttaacgcctaactcacccaataaatcatgtcccatcatgattgtttgtacatcacttaatgggttgcttgagccaaagctctctaccccaatttggtgaaattcacgttgacgaccggcttgtggtctttcatatctaaaagttgattccatataaaaaacattaaatggcttaacaacttctggcgcatacatcttgtcttctacataagcccgcactacgcctgctgttccttctgggcgaagggcaatatggcgaccccccttatcatcgaagtcgtacatctgtttttcaacgatttctgaactatcgccacttgaacgagcaaagatttcataattttcaaaacttggtgtgcgaatctcacgataatttgcgcgattgaagaaatttctggcagtttcttcaactttttgccatgaaccagattgatcaggcaaaatatcaactgttcccttaggtttttgaactctcatttaatcatcctttttatattttgataacttgattaaaaataaaaagcgcccttgaacttaatcaagggcgcttagattagcacggtaccacctttttggttgctgcgattaacgctcgccaaacgatccattatctgttaaaggtgtcacagaccgcgatctatctactctctcaccacaacgagcagtctctttgaatagatcattgctaatccacattctttgtcatcgataattcttacttagcttatatttttctcaagacattgtcaacctttgcggtctcattttttcgctaaagatctaacacaatcgtgaatggaccatcgttttctaaactaacttgcatgtcagccccaaactcaccagtctcaacgtggaaaccgtcattttctagttcttgattaaagtcttcccaaagttctttcgatcttggtggacgcatcgcatcaacaaaactaggacggttgccttttttagtatttgccatcaacgtaaattgtgataccgacaaaatttctccgttaacatcctttaaagacaagttagtcttcccctcctcatcttcaaaaatacgcattttagctattttatcagctgcttttttgattactggcaattcatcaccatttttgatgccaactaataataaaaagcctttaccaatcttgcccacagttttaccgtcaatatctacttgagcatgatttactctctgaattacaactcgcattaattatctgacctcttagtttcgtatacgtctggaatatcacgtaatttactcaaaatttcatctagttgatctgcattccgtacagcaactgtgacatacatatgtgcaacattatcttcgtttactttaccagagatattattaatattcttagtaagtgagttcaacttattaataacgtcactaagcagattggaacgattgtaaccaaagacttcaatatttgcattaaaggattgaacactattttcctcaacattttcccattcaacatcaattaagcggccttgttcttcagcttctttggtgatattacggcaatctgttcggtgaatagttacaccgcgacctttagttacatacccaataatcttgtcacctggaactggattacaacacttagctaaatgaagcattaagtcactaacgccttggatcatgacgccatttttatgcttaaccttcattgtagtatttgaattcttcttaggttgttcttcttgaactgcttgttgtccagaattcaaaatcttttcttccagctctttttgtttttgattttcttcctcacggcgcaaatcaaccgtcaagcgattaaccactgcttgagcagaaagatcaccaaagcctactgccgcatatagttcatctgcagtgtgataattaaagtgctctaatagcttttcaattcgatccctggccataaattctttgggtgaaagatcctcatcgcgcaacatatcagcaatcaattgttcaccatgctggatgctatcttctctatcctgacttctgaagtagcgtctaatcttgttgcgtgctcttgaagtcttcaccatgtcaacccagtcacgcgatggcgctgcattagtctgtgtcataatttcaataacatcgccattgcgtaatttatagtccaaaggaactaatttgttattaactttggcacctactgcatgactaccaacttgagtgtgaattgcataggcaaaatctagcgtaaccgaacctttaggtagttcatatacttcacctttaggcgtaaaaacataaactctgtctgaaaaaatatcacttttaacagacttcataaattcaccggcatctttagtttcatcctttaattcaaggatttctcttaccatatccagcttttcaccagaggtactttgctcaacaccagtaaaattgccacgcttataagcccagtgtgcagccacaccatattcagctactttatgcatttgttcagttctaatctgaatttctagtggacgaccgccaggcccaataatggttgtatggagtgattgatagccgttaacctttggcatagcaatgtaatccttaaaacgacctggcattggcttccattcagtatgaacagcacccaaaacagcataacaatcacgcacatttttaacaattacacgtacggccaataagtcataaatctcatcaaaatctttatgcttattaaccatctttttatagattgaataaatatgcttcggacgaccataaatttcatatttaatgcctaattcatttagagtcttcttcaaagtcttgattgtatcggcaatatatttttcacgctggcttcgcttgacatccatcaagttaacaatgcggtaataggcttcgggatttaagtagtggaaagacatatcttctagttcccacttaattgtcccaatacctagacgatcagccagcggtgcataaatatccattgtttcggaagcaatacgccgctgcttatcaggtcgtaagtgttgcagagtatgcatattgtgtaaacggtcggctaacttcaccataattacacgtagatcttgagccatggcaatcaacattttacggtgattctcagctaaaaattcttgatgagacttgtactcatatttgtttaacttggttacaccatcaacaataaaagctacatcttcaccaaatttttccttcagctcatcatttgtaactggggtatcttccactgtatcgtgcaaaaagcccgctgcaactgtatcaggatctaagcctaatgtagctaaagttccagccacttgcgttggatgaataatataaggttgtccagacgcccgtttctgtccagcatgagctttattggcaaattcatatgctttttcaacaaaggccacctggtcatcattcatatactttttgcaggtatcaattacctgatcatgcgtcatttcaatgtatttggacattatgatcatcccctctagcggtaaatatttttattcattaagccaaaagcttcaattattaagtaaattaaaccaaacattaaattatacaaagcaaaatgtggcaacattgctaagcagaaaagcacaggtaacaagaaaatccaccacttggacaggttaagtttaataaataaattgcctagatggtatgcaatgatgctgttaataataaaaaacagaattgcttctcgccacactaccggcacacggcaaatgctaaagatatacggcaaaatcattaccaaaatactccaccagacaagtgacatccagcgatgagaattcaacttcctgacaattggaattgcttcgattttatttcctagttttttcattaaaagattgtgcctctcatcaaagtttaatttaattgataatattttaccatatttatttttcttttctagtaattgctagtccaatccagcgaccttgacgcatggttaaatcgaccttaaagccattctcgtctagagccttttcaatcttaggcaattgcaggtagtcaattccagaaaagataacttgaccatcgtcgtttaaatgactatccatttgtggaatcaagtctagtaaaatttctgccaaaatattggcaacaatgatgtcaaacttgcctttaacatcagctaacaaactagtcttttgagtgtgaatattattaatatcgtttaaggctgcattttgtttggctgcagtcattgattcatctgaaatatctgtggctaaaacgtcagttgctcctaattttgatgcagcaattgccaaaataccggaccctgtaccaacgtccactacattcattggcttaaccattgctctctctaggcccatcattgctaattgagtagttttgtgatttcctgtaccaaaagctaagcctggatcaagcttaattaattgctggtccttaaaagcgggtttgtaatcttcccattcaggcacaattgccaagtgacgtgaaaaatcaatcacgtgataatacttttgccatgccgtgttccaatcttggtccttaatgtatgaagttgtaattttggcatcccctacatctaggccatagctcttcaattcctttaacttatcttggaatttttttactaatgcgtctttatctgcttcttcatcaaaataagcatagaaatatgtatccttaggtaagtctttaatgtcatccatttcaactacagtagaatcatgcaaccagcctgcttgctcaaagtcgctacgctttcttgattcaatacccaatgcattcagattatctaaagcaaaaacgctcaaagcgtcttcaacttcatgactagtatcaattttaataattagtaatttcattaatattatctcctttgggattttcttggcataatgctatcatgataacaggtgataaatatgtcaaagaagaaaaataaaaagaacaaactcgaaaaaacattggtcgaaaaaatcttagaccaaaataaaatcaagtatcgtcaagctcaatttgctgtctccgaagataaaggcggagttgcacaaatgaacacttctattttagaagacaaagagcgtttagtctataaaactctcgtctgcgaaggaaataaaactggtccattggttggtgtcgtaccagttactgaacatttaagcatgaaaaaattagctaaagtttctggtaacaaaaaatgtgaaatgcttcccttaaagaaattagccaaaacaactggttatgtacatggcgctaatactcctatcggaatttattttaaggaaaagtttcctatctatttggatgactctatgcaaggaaatcctgaaattggtgtttctagtggtgaagttggccgcagtgtctttttgaacccagaagacttagccaaattctgccatgctccttttattgatctaaaagaataaaaagcgcttacaatttattgcgttattcttcttcttttgtgttatagtaaatatatgtaccgcatacagaatataacaattacatagaagaagatgacaaaaatgaatatattgttaggaattattggctttgtagttaccatgatcgctgcctttgttgttacggcattagcaattgccaagtaaataaagcgaaaaaataataacagatttaaaatgacgtggtttgatatcatgccattttttattttctatataatagttatttattatcaaattataaatatttaatatataaggctaaactatttatactaaaaagaaagtttttgaaactgtcaaatcttttgtgtaaatagttctttctcgtaaattgattttttaatcatttatttaatcaaaataggattctaaggtatcctgaacctgaccaaagcctttatgaattcggttgaaatagcggtcattgtagctcattgcctggatgccaataaatgcatcaagcgactgttcagttggaaattctgccttaggcttagctttacgcttgatgacgttgttaaaggattcaatcatattggttgaataaattgaagctctgatttgtttgggataattgtagaagaccagcagatcgggctcaatttccttcaaacctttgatgacattgctataagctttattccatctggcatagaatttgtgcaagacagctgcagcttcttttttgcttgtctgttgatgtatctgcttgaattcgttcatgatcttttcgcggtcatccacccggactttagcacagatattgcgcatgacatgaaccaggcagcgttgaaaatgagctttaggataagtcctggccaaggctgttttcatgccaacaacaccatcagaaagaaagagttcaacttgcttcaagcctctggacttcatgttttgaagcatctctgtccagacttcaatgttctcactaggagcaatgcagtagtcaatgacttccttatgtccattaggtttaatgccaatggcaatatatactgcttcacgctcaaacgtttctcggcgcaaaggaaggtatgtcgcatccaaatagacacagaaaaacttgtcgcttagcttgcgcttgtgataagcctcaaccttggggagcatctgcttggaaatatttgatacttgggctggactataatgactgccatacattttctcaatcaagtcagcgatttctctggtagttacgcctttggagtagagcttgataatcgtgctttccaaaacatcagagtgctgcttgtagtcaggcagcgtgtgctgatgaaactgaccgttgcggtctcgaggcacttgcacttcaattggtcccaactgggtatcaaccttgcggaaataagcaccatttctagaattgccagtattccagccatttctggcatagggatcatagcccagaaaggcagtcaattcagcttctagcaagttattaacagcctgttgtagctctttgcgcaataaatcgtttattttgtcttgattgaatagagcttgtgctatattttttgtaaaatcattcatgaaggagttcttctttctgtatgtgtttttttgttcaaaccaatcatacgagaaaggaactcctttttctaatgttttaagaaataaatttaaggaattattcatccttacacaaactattttacagtctcaagtttttgcctataaaaaagtcaaatttatatcagcaatgttatttatttgtgctaatctaatatgttgtcaaatgtaaaaagaacacattgataataaattgtaaaagactcagtcttttacgttcccaaaagaaggtttagataaattaaacacaaaaatgatttgagcttcaatacaaaatttaatggaaaacaaaaatttggttttagaaagttgtctgttggtttagctgcagttgcacttagcactacttttttcttaagtaatagtcaacttgttcatgcggatactaatactgcgactaatgaagaacaaactcaacaagattcacaaaaatctaatcaagaacagtcaaataataccatccagtcaactcaagctgatccaagtaaccaaaataatcaaagttcagctaaagattcaccaaaccaagaaaaaacaaaacaacaaacagtcgaaattaccgcttttcatacagatgaaaaaggtaacaacgcttccgaaataaaaaaagatgaatcagcttctttaatggctggtcaaggattgcttaaagagaccaaaacattctcatggaacggccaaattaaaggtagttctgacagtgaaactgaacaaactaaaactattagctacgtaattaaccatatctacgctaacggaagtcaaaaatctaacactccatttgcatctgatgaagtcatgctcaaacttaaatctgaagattcgggccaaagctggactcaatattctattgataatggcaaaacttggaacgctttagcccaagcatatactgtcacagtttctcctaataaaaacgctaatgcaaaatatgtagcagacttagttaatattgttactcctgataaaattagactcaataatcaacaccaattcattattgcttcatcaactccagacggtactcactatgaattaactattccctactacataactcaacatgcagatgtcagattttatgatgacactgataaaaccgatcaagcaatcaataaactacttaacgataatgggtttcaactctcaatgactagtgatgaagctggtcaagggcttagtgctgattaccaaaataaagacgaccaatcagctaatacccctattcaatttagcaggttagaagaagcattagctttatttaaaaataagcactataaaattgaaaaagtttctggcgccaatgccacattaaaaacggacagcagtatcggctttggcaactttgataataatgaaaatgtagatcaacacttcatcatttacttagttcatgaaacgcagatagaaaagcaaactgctacagttagggaagaagtaaaaggctactatgtaaacggtcttaagagccaaaacttttccggtataaataatccagatgtggctgttcctaaaaatgatgaaacacctactccaaatgtagtaaaagaagttatttactctagaagcagggttgttgatttagttaaggatccgcaaggcacagaaacaaactggtcacaatgaatatcaaacaatcaagcattttcagctattccgtataacaatactacaattaaagacataattgatggccattatcatttagataaaaatggcgtggttcacattgcttcttcacagaataaacttactgctacaagcaattcaattactgggatttccgcaattgcacctaattcggagtttttagcttcaattgcttctaccacagttaatggtcaaaaaacaacaactggcaatctagcaactattagcatttgggtaccctatagttactccgcttctaaaccggaaccaaccccaactcctattcctacacctgaatctgagactccgactactccagaacaaccgaagcagccttctgagccaaataagtctgaaccacctaagtctaatgaatacaaacagacaaagattcacaaaaaagtaaattggaattctagcagtcatccttatggcactgatatgcaaagacagaagcaacacaaagatggaattattccaccccatggaactgccattaataatattccaaattcaacaacaaagactagaactactaataatatcgttaagtcttacaataatattagttctaaattaccacaaactagtcaaaataattctaacctgagcttaatcggtctagctttagcagcactaggactactgggatttactattacaaaaagaaagcatgattaattaacaatagcaaactaaaagagacagacaaaaaatccgtctcttttttctaccttaatttatttaatctgcatgtctccacttcttatcagttaagatacgtgcagctaaaagacctaatagcaaggccacgacaatcatcaacgcttctacgatccaataagctccgatattaatattcgtgattccaaagttaaatacagctcgatacatgtaaagaccaggcaccataattacaattgatggaacagtaattgcaattcttggaaaaccaacttttttccttacaatacttgctaatagaccagctgttaaagcaccaataaatgctgccaaagctggagcaacctgagcataatcgaccaagctaagacgtaatgtatttgccattgctcccattaccgcggctgtagctgccatttgtggtcgactgttaaacataattgaaaaaccaaacaccccacaaaagctagccagcaatcgcaagcaggttaaagtccctggatcaatttttaacttaggcatagatcctggatgcaaacgcaaaattgttgctacagcccagcctgccatcgttgcaattacgataattaaaatcgcataagtcagccgttcaagcccagagcgcatatctaacttagacatgtccaatccagatgtaataaatggaaaacccggaattacgaacaacatggcaccaatatagccataggcatgatcatgattaatgtggaataatatttctcctacatgaaaactcataaagtaaacactgcaggctatggcaaccgcaaccgcaatcttggctaccaaagttaacctgtgcttacccataattgctctaatatattgaccgcaagctgcacccaagaaagcacagatcacctcaggaagaccgccgcctaataagaaaataaagccgccgcaggccaagcctgaactaagtcccgaaattaacggagaatacgctgacttttgctgagaaatctcccgtaagcgtttatgaatttgaccgatagtccattccccatgtcccttttcaaattgccgaacgaatttttccatttcattcaacttagtcatattcacacctgttgctggtaacgataaagtctgggaatatgattcattatcaacatcaaaacaggtatattcaattgacactaatccaatatccgttgaacaggtaatgcccaaggttctggcaaccgtatccattgaatcacgtactcgccaagcacctgtaccacagcttaaaagcataatacctactcgacctacaatcgaggtcttttcaactaatgttgcatcctgcgccatcgtattattatcgctcttgaaaaattcctcccacagaatcttcatatgatgtttttctgataaatgatgttctcgatcaatttcactcatgctattattactttccctcacatagttcgcataattataaccattatattctaccacaggaacttcatcataatttttgatattttaaaatttgctgctcctttttattattttaaatttataatagacatataagttattttgaaataaaggatgatttaaagtggctcaattaactgatgaacaacttgctaacattgctcatgacttttaccttagtcagcttaatattgctgatatctcacaaaaatatgatttatcgcgatatttaatcgctaaagcactagaagacgcgcgtaaccgtggaattgttaaaattaaaatctcgcgtggaatcaaacgcaatcaggtactagagagagaatttcagaaaagattcagattaaaagaagcttttattgtcgaaactaccggcaaccgcgatgaaaatagtgaagccgtagttaacttcgctgctaaacaaattgaaacctatctaaagcaagcaaaaatcgctggtattagttggggtgcaacaatgcatggcgtgatcaacgacttttttgagcaggacttagagcaactttactttattcaattacttggtcaaccaattaattctaaccgcaggaagaatccattggcccaagatgcagcagaaaaattgcattcccatagtctaagtctgccaaccccactttatatactaaatccaaagatcatgcctgccttgaaacatgagccttattttaaagtaattgaaaattgttatcatcacttagacatgcttttcactggtcttagtactttccaatcatttcaagctaatcaatttttgaaagaaaattatggacctgaactatttaaagacattcctgactgcgatgtagctggaatgatcatgggacgaccatataatattaaaggtgaatttttccctgacttcgaacaacacatttgtggtatcagcatgaatgacattatgaaaacgccaattcgtttttgtgtcgtccgcaatcgctttaaatctgaggcactccttggcgccttacgtagcggtatcattactcatctagtaactaatgatgcaattgcccaacgcgttttgcaaaatatcgattaattcgctaaagtaatacagagatagactatttataatgaggagaaaaaatgaaaaaatctaaatatgatttatggattggtgcactgaacctgatcaattgtgtgttattcattagctcttggtttgccatccttggagctgacttcactgctagaatagctttaatattttacttatttgcctggttcggcgtgatccttaatgccgttgcagtagtgcaatcgcataacatgaatatctcaccaattgggccaattttaggagtaattggtaatgcactatatggctttaccgctgctctagccttacctgctgtgattgttaatattatttctgccttctttatctttatgcaacatagcaataaaaaatagaaaaagcagccaaaaattggctgctttttctatgctaaaatttgttatgtactggttaacaattactaaagttggatttacaatgactgggaggtgagcattatggagtttagaattgatgaatgtattccagatgttgtatcaatgatggctttagcacaagcaattgcaaattttgacctcaatggtaaaaagccacaagatgtgaacctaggaaggatggcaaatgtctaaagtttttcgaaatgacttaaaaataaaggacatccctaatcaaagaaaacttagggatgtctttttttagcctaaatatgaaattgctacttgtaattgtgccagcttcattgccgcctgagccacattcttgcgatcaacatcaacaaaaatttcacagtgtttttcatcaaattcataacctgaccctagcgcaatatcttccgcagtttcatataactctttatcttcctcattaggatctagcttaaatagaattcgtccgccatcactaacgcggcaatgatcatcggcttcctcaacccaaacatatacggtatcgccataagaatcaatcatcattgtggcaatctgcaatgtcctatcgtcaacccaaattgtcttggttaccttagcaacatacgaacctatttcatggttaattttctttaattcatcctgcttcattttttacctctaatttataaattcttttctttaatataaggataccctcttagcaattcttctacaaatttattaaatagattggatctcccaatcagcttgactgttaccgcttactaattataccttgtaaatatactaaattttggagaaaaatatgcatactaagggtttatcagttaaaaatgttgtagcgatcggaattggatcggcaatctatgttattttagcacgtttcacatcgattcctacgcctattcctaacacaaatattgaattagtctttccttttttggctctttttgcgtcaatctatggcgctaaggtcggttttattgtcggctttattggacatgctttgtccgatttcattatgtacgggcagacttggtggagctgggtattagctactgctgttttaggctggatcatcggtttagcggccaaacgcttagacttaaaaaatggtatttttggtattaaacaaataatcttttttaatatcattcaaattattgccaatattctcgcctggattgtagttgcaccaatcggtgacattatcatctatagcgaacctgctaacaaagtttttgtccaaggaatttcggctacgctttctaatggtattacaattatggtcattggcacgctcctacttaaagcttatgctggaaccaagattaaaaaaggcagcttgcgcaaggaggattaaacaatgcctaaaacaattattgaattcaaagatttttcatttaagtatgacagtcaggccgagccaacactaaaacagattaatctaactatcaaacaaggtgaaaaattgttaattgctggaccatcaggttcaggtaaatcgaccattggccgctgtattaacggcctaattcctaatctagatactggtgagatcaccggtgaatgcactattaacggcaataatattaaagacactaacctatttgatctttctttcaccacctcaactatcctacaagatactgacagtcaatttatcggcttaactgttggtgaagacattgcttttgctttggaaaacgactgccaaccacaaaattatatgaaacaagttgttcatcgctgggctgatgaattagggattgagcatttattaaagcaggcgccacaaaatctatctggtggtcaaaaacaaattgttgctctagctggtgtcatggttgatgaatcaccaattttactttttgacgagccacttgctaatttagccccagcttcaggaatgaaaacgatggctttaattgatcgcattcaaaaagaattaaatgctacagtaatcattattgaacaccgtctagaagaagtttggagtcagcctatagatcgcattatcctaattaatgatggtgaaattgtagctgataagaagccaaatgatctattacatgagaattgtttagaagacgttggtgttcgtagtcctctttatttaaatgccttaaaaaaagctaacgtcgaccttacgcgtattcccgacctaacttcagtcgctgctttgccccaagatcctgaaattgctaagcagttgcaagaatggcaaaacaacattaccctaagtggtgaaaaagaagagactcatcctctattagaactcaaaggcgtcggccaccgttatagtaaattgcagattcatcctttacatgacgttacagcgacaatcaatcaaggcgattttgtttcaatagttggtcaaaatggtgcgggaaaaaccaccctttgtcgaattatttgtggctttatcgacaatgagggacttattttatttgatggtgataaccttaagcagttttcaatcaaagagcgttccgataagattggttatgtcatgcaagatcctaaccagatgatttcccaaaaaatgatttttgacgaagtagctctaggcttgcgtctacgtggttatgatgagcagactattcgcactaaggtctatgatactttgaaagtttgtggtctttatccgtaccgcaactggccaatctctgctttatccttcggtcagaaaaagcgagtcacaattgctgcaattttagtgcttaatcctgagttattaattcttgatgaaccaactgcagggcaagattggcaaacttatactgagatcatgaactttttaaaacagcttaatgatcaaggcaaaacaattatgattatcactcacgatatgtacttgctgatggaatacactaacagatccctggcttttgctgatggaacactaattgctgacacagatccaatcaagttattaactgaaaaagctttaattaaaaaggctgctttgaagcgaacctccttatataatctcgctatcaaatatcaattagaaaatccagatagctttgtccgcgcctatattgatgcagaaagggatgaaaaacatgcataatgaaagccaagttttaggttatcaacctggtgattcttttatttatcaattaaacgcaaccactaagttagtttttatgctcctagtctcggttgcttgtatggtaacttatgataccagattcttaattgctatctgtattttatcaattttcttgtttaaagaggcaaaaattaagtggagtcagatttcttttatcgtgaaatttattgtagttttcatgttgctaaatctgatttttgttttcatctttcagccaagctatggtgaaaatatttatcattctaaaagcatcttgatccatgccggctacttcacattaacattgcaagaggtattctacttattcaatcttttcttaaaatatgtctgctcaattccaatcgtattgctgtttctattaactactaatcctagtcaatttgctgcttcattaaataaaatcggcattagttacaaaatttcctatgctgtttctctagctctacgctacatcccagatatccaaaattcttattgggatatctcagctgcccaacaagcacgtggcaatgaactatccaaaaaggctagtttaggcaaacgaattaaggggacattgaatatcgtgatgcctcttatcttctccagtttggatcgaatcgatacaatttcaacagccatgcaattacgccgctttggctcaaagaaaaaacggacctggtatgtcacccaatcatttaaaaaagctgattatcttgtaatgatcgcagccgtgattttggtattaattgtggttggtctctggcaacttgatcatggtagattttataatccatttatttagaccaaaattaaaaggacctaatggtccctttttggttttcgatttttctgtttatgatcatcttgagtgacaatctcaggtttcttaggaatcggcggcgtgattatttcataattacgcaaacggtgttcaagatagtcatctaatcgctcttgcgtattttcatgtacaataatcattaaatcgcctcacttttcataattatacctcaaaaatgtaggttaaacagcgtaattactaagtatgtcattccactagcaatcacaggacctgcagctacacccttgaaaaccactactccaataatagtacctaaaactaatgcaaccgtcacctgtggcaccgctgctaattgatcaacaccataacgtgacaagatagctacagcaattcccgctaaaatggcaatccatccagctggcgacttaaaagttttaatcagatccttaaagccaatctgtcctgtcgcaataggaactagaattgcaaccgaaataatagttacgccccaattaatcccctttgcttgaatagtaggcagccatttactagtaaacggtaataatttaaacaccattaccactcccgttgcaataattaatgacatgtttttacccaataacgctacaactagcaccaatgctagaaataaccaactttccatatttatctcccctcaaaaaatcattagcattagttcactttaacaaaaatattcatcaaaacaaaataatgagtctaaataagtgaaaatcaatctaatttgtgtcataataaaattactcagaaaaatatatgtatacgcgcacctcgttcttaaaacgaggtgtttttttacgcaaagaaccaatgcagatatttcacctacactggttcttcttagttgaccgatattgcgatgtgactttactactgcatcgtagttagaatttgcaaatatttatgcttgaaaataaaatatttgccccggatttaaaattgaagtgcaacactaagtgttaaacaaaaaggccatgaagacctaaacttgaagtgacgaaaaatcaagaaaggaagatcttcatgaccaattcaaattctagcatttctaagcactatcatcaattaaccagcgtacaacgtggacaaattcaagcaatgctggattccggcataacttcccgtactgttatcgctcaagaagttggctgccataagtcgacaatcagtcgcgaaatcaaacgcggaagcgtcctgcaaagagacagcagctatttattgtatgagcactattacgctgatactgcacagatttattatgagaagcgtcgcaaaaactgctatcagcgcaatccattgaagcattatgctgtctttttgagaatgctctccagacgctttaaagctaaatttgatgccaccagcatcgatgagttcgttggtgaattccaaaggactatgccaggctacccttgtcccagcacaccaaccgtctatcgctatattgatcagggcttgctggacataagcaatattgatctgcctatgaagctcaaaagacgcaggaacaagcgtcatcacagccatggcggtcacgctttgcacaagaagcatcttggcaattccattgaacagcgtcctaaggaggttgaagacagaaaagctccgctgcactgggaaggagatctggttaaaggcgtcagacgcaagaatcagcctgctttaatgactttgactgaaagaaccacacgctttgaagtagttatcaagattcctgactatcgggcaagcacatgccaaaggctgcttcaaaaggagattgacagacatcctgcctggtttaaatcaatcacgtttgacaatggctctgagtttgcggatatgaccaagatcaagggctgccagatttactttgctcacccatattctccatgggaaaggggcaccaatgagaactgcaatggtcttttgcgtcaattcttccctaagggcaagagcatgaaagacaagtcaaaagcttatgttcaacaggcaactgatgccattaaccacaaatatcgccgaatcctccaatatcacacagcagaggaactcttcaagcaatatatctcttcataacctaactgttgcacttaatttgacaattcaggaataaaatatttgcacaaataattaaaaaacgtttcttgcaaaaatacaacttaacattttaataaaaacaaaaagatgccactttcgtgacacctttgtgattacttattcatacatttcgttttgaactaatccctaacttccttaatggtatcaatgatagtaccatcacgatactcaactaaggcaaccgtacgatcagtatattcaagtggctttggtacaccaacttgtttttcagccattttttgcaattcattaatatccaagatcttaagtcctggcaccttactaaaggcatccactaaatcctggcgagctggattaatggcaattcctctttcagttactaaaacatcaattgatgaacctggagtaacaatagtttctactcttggaacaacagtcgcattacgtccccgaacaagaggagctgtaataatcgtcatcttggcaccagctgcggaatcttggtgaccaccgacggctccacgaatgacaccatctgagccagtcataacattaacattgaagtcagtatcgatttgtaaagctgacaagattgaaacatccaagttgttaaccactgcacccttattatgaggatcagcataccaagaagcatcaatttcttgttgatttttattgttagccattgattgggcagcacccttatcaaagtcctgcacatccataacttttctgactagaccttcttcaagtaagtcagtggtaggtttagtaataccacccaaagcaaatgatgcagtaatgccatcatcaatcatactttgacgtaagtacctggtgacagctaatgcagcaccaccagaaccagtttggaagctaaacccttgcttgtaatatggagagttaatgattacctggttaaccatttgagcaatcttgagttccttaggatccttgggaaagcgagtggcaccagaaccaatcttgtctggatctccgactttatcaattttaaccacataatccacttgatcttgctgaattgacgcaggcgtatttggataatcaacaatattatcagttaataaaacaaccttattagcatagcgagcatccattagggcatagcccaatgagccgaagacagcatccccatcttgaccgttagcattacctgcgggatcagatactggcacacccaagaaggcaacatcaaccttaatctcgccttcttcaattgaacgagcacgattaccatgtgagcggaaaattacaggattcttcaagccgccatgtgaaacaaaatcacctagtgaaccgcgcatacccgaagaagtaatattagtgattactccctttttaatcgcttcgataactttatcattcataacaccagtaagtgaacttggagccaaggttaaatcctggtaacccatactaataatcttgtccattaccaagttaaaaacataatccccatttctaaaatggtggtggaatgaaatagtcataccatctttcaggttattcttgattacctcatcaagtgaatcaataatcttattttgtccagtagtaactcttacctttggagcaacccgcttaacttcaggatgaccaatttcagtagtttcaaatggtttcaaattcatttttttcattaaatcatctggtaattcgcgttttactttattctccaatgtagttaccttctttatcaatcaagttagaagctttcgctgtttccaaaaccctggtagccttttctacaactggcttatcgatcatcttaccattaagtgaaataacgcctgagcccttagctttggcttcacgaatggcattttcaacattcttagcttgctcaatctcttctttagttggattaaagaccttattaaccatttgaatttgacgtgggttaaccaaactcttgccatcataccctagttcatggatatagttagtttcacgatagaagccttcagtatccttcatatttgagaacactgtatcaaaggcatatacgtctgcggcccgagctgcttgtaaaaccatgttacgcgcaaattccaattcgcgaccatctggataacgatgagtatgcatatctgcagtatagtcttcgccagataccgccaagcccatcattaaaggcgttgcggttgcaatttttggggcatttaagacacccttggctgattcgatggcagccatcacgccaatagaaccattttcaatgtcaaattcatcttcccaatgttcgatatcctttaccaatttttgaatcattgcagctgattcagttttaggcaagcgaataacgtcaacgccggcttttaccattgccttaacatcttcatcgtaaaatggcgtgtcttgaccattaacacgaactacaatttcactgccaccgaaatcgactgtcttaattgcctcatagaccaacattctggcagcatctttttccgttaatgaaactgagtcttccaaatcaagcataatcgaatctgcaccataaatgccagcatccttaatcatagctggattattaccaggtacaaacatcatggttctacgcaaacgattcttaacgtatgtcatttagagcacctccaaatctggcttgtctgaagtttcggttgcacgttgtgcagctgctaaagtacgagccttaattacacaatccagtgctcccttatcggttgctttaaccttggcattttctaagccataagcttttaaggtgtcagtaatcaccttttcaatctgatctccataggccttttttacttctgattcaaggtcaatctcaatgccgttagaaccctttgaaatcatgatttggatatctgaactctcaagtgttcccgcaactgctgtggttttaatttccattaatattcattcctttctcaattttagactgcaatttctgcatgttttgcttaataaattcataagtcgtttccggcacgaatttattgatctcttttaaattgccatccttgatcagctgtctaactttagtggcagtaacaatttgaccgtctttttccaagcgatcaattacgattacttcaatctcaggaccaagctcatgcgctaggctaacattataaaagtgagtcgttcttgaaattggttctttaccaatataacgacgggtaatgttcagtcctggtgcaatttgattcttaaagacagctgcgtctatcaccgtttgtacagcaattaaatcgtcaggtgattttaagaagtatgctggaaaagtagctggtgaaaccatgtagtctccgccagagattactttcacattactaaactccttagtaccttcttgcaccaatttgaagcgctcatcaaagctaaacaaagaaacatcattagccacaacaaagacataaaccaaatcgttttcttcactagccatcttaatcaaatgctgatgacccaaggtaaacggatttgcattcatgactattgcagcgaccttcttatgctcttgatctgctatttcgggcacttcagccacaaattccttcacatcaggcgttccattttctaaaaaggctgcctgatccgtcttggctaacaaattgaagtgcaagtgctcaaagctagttgcatactttgctttagtaaagacaaaggaatggaaaattccatcattagtcaaatattgcgttaaggctgtaaccactttattaaagcgagccccctgcgtatcggcatcattcttgactccgatatactttaagacattaccagccacactaccagtaccaactaaattgccttcctcatcttctagcccaatagtatgatcaatcacgttaacttcgcgttcactaaaatcatttaaccccaatgattccaacaagttttcccatttttgcctagttgtagcgtcgtttaaaaacaaatcaacgactttatccataaatatgccaccttgctatttcggtaatcgttttcacaaatatagtttactctcttagtttgattatttcaatttatctattaattttttaaatttttcaaaaattcagcaataatctcatgcgttttttctggttgctcagcctgaggcaaatgcccacattccggtacaatcgccgtttgaacatcttgattcagcatttttatcgcttgggtaaattctggattaaaaaatggcgattttcccccagcaattaccagcaggggaaccggcgtatccaaaatcatgtcacgccaatcttgctccgcatgttcaactaaacagttatagttttcggctggatcatatgggaattcttgatattcctttttagcagccaaaaacattttttcatcaatgtgatggtaaaaagccttgccaaaatcaaatttaagcatgtcaggataattatcccaagttaggtctttaaagccatacttccagctcttatccgcaatcatctttggtgactggtctaaatcaaccattgcctttagtctacctttgccataaattgacaaatatgcccaaatattggcggcccccatggaatttccaatagctactacatcatgcaaattgagcttaactaatagctcctctaagtcaactgcatgacgactaatccgctgtccacgataggttcgttcggactgtccttgattgcgtggatcaagcataataaaacgataatcatttttaaataaggcaattaaatcttgccacatttgacaagatccccctatacctgggatcccaatcaaagcaggcttatcttcatcccccgtatcggtataatgcaaaattacatcgtcattagttttaaatttcatctttaatcttctttcattttgattactcaattctattatgacgcaaaaaaagcaacctggtgattcccaatgtcattaagttaagacattgacaattaatattagacttttaaagcactgatttaacatttaattggttaaattggtgcttttttcgtacaacaaataaggcatagcacagattctgcttttttaagctacgcgatataaataatatacagctgatttgggcttaatatttctcttgtccttgcggcctggtctaattggaatggtataatagctgatctgaataaggatccgttcaaaatcttgcgttaaagaagaagccaaatacatgctctgaataatcaagcatgattgcttgaaattgatggcatattgatacttgcaatgcttttgcggaatataggcctgtgcatcaatttgactgattgcattaaacataatcatatgggcataaatttccatttcaataaatttatcttgtttggaatggaactgtacactgcctaaagaatacttcaatttcttgaaggaggtctcaataccccaacgcagatgataaagctctttaattctttttagcggataattttttcgatcaagattggttagcacaacttcccattcttctttgcctgatttggcatcattaattctaaatttgcaggctcgaaattttattgtgcataactcgccaaaatcccagcttagatcctgggtatttttagagcgatacttaatatattggcgataatgatgctggacatggtgaatattctcactggctttatgcgtgatgtagtaatagttagaagtagttaccaggcaggaaatctcacgatcacattcttgatcaggcaatgtcgttatttctttaactccgccttgtccagccttagttcgtattatgtaatgacagttaggcaggcgattgcagttttcaatcatattgaaactagtgtagccacgatccattgttacaatatatggaccacaattcaaagctttaagcatttgaacagccgctttgcgttcatccatttctgatttaggctgaaaaatacaatcctggtaggtattattcaatagatcatataaggcattaacgtgaatttgacaatagggtttctttttatgagaagaagcttgtacaatgttattcgatttcggattccagatttgattaaagtcagagccatcaatggcaaacaaacggtagtgatgatcaaaaagttgaatattaaatagattttgattaaaaacagtcagaatatgtttaaaacaagcaggagaaagctggcttttgcgttgaacataggcagaagtactaactactttatcgttctttttagttgcatcttcgccaaaagctctaaagagttcactgtttaaattctgaccttgcatgttaattgtagttttaaggactgtcgctgcatctaaagtgcgtttcctggtaaaagcatgaggattattaataaaatcgtgaatatgatccccagtattattgataatttgatcaagacgttctagaatattcttatgaagggctttcataattaacaccatctttctggcaataattttgaaggtttaaaatatataatatataagataggcgaaaaggctggtcttttcgcctttattttatacaaaaaaagagatcgaatccaaatgattcgatctctaaaaaagcacccttaattgtcaatgtcttaacttaatgacattgggtgattccagattgctttttttttaccataaaccaataatcttcatccaaagaactccgacagttccaaaaataatcatatagattaatccaaggacaaaattcatcttccaccattcaccttgtttaacatagccagtagtagccaaaattgtggcaggaccattagcatagtgagtggttgatgcgttgattgcaccagtaaaggctaaaagcattgcggaaaggcctaaaggagcaccagttgcaaccgcaacagacaagaatggcaaataaagagcagtcatatgtgcagttccacttgcaaagaagtagtgggtgtagaacaaaagcaaaactagaattgccaatacaaagccccagctaacaccatgaagactattttgaactaatttggagaaccaatcaataaatccgtatgaaatcagcttaccagccatgaacatcaggatagaaagccaaatcaagatattccaagcaccagtttctttcagagcatcctgcattgttaacacaccggtaatcatcaaaatagttacagccaggaaggcaacaaaagtcgcatctaattgtgggatcttaaagaaactagacaaaacccataaaacaattgaaagaatgaagactgacatcataattttttctggagttgacattggtcccatttttgctaatttttcatcagcccatttcttagcatctggagtttctttaatctcaggtgggtacatcttgtaaataacaaatggaatgattactgccaatacagcaacaggtacgattgcagtgaaaaaccaacctgcccaagacatttgatagcccttttgtgcggctaattgttgagccaccatgttaggagcagcaccggtaataaacaaagccgttgataaaatattggcatgaaaggcagtaaagtcaatgtaggcaccaatctttttacgagaagcatcatctggcttagaatcgtagccttcttttgaaacagattcaacaactggccaaacgaccccacccgtacgagctgagttcgatggaattaaggcaccgagaattaattccaatccagtaatcgcataaccaatacccaatgacttcttaccaaatttttgaatcataatataggcaatacggttacctagacctgttttactaataccatgagccataatgaaggccatagcgattaaccatgcagcagagttaccaaatgaactaagcacgccttgattaactaccataccttttgcatttgtaacgtccttcattggtgctaagccaactaaaacagttactaccaagccagctaaggttgtaccaccaattggcaaaggttttgtaatacaccctacaattgtggcaacgaaaacggcaaacatttgccatgcctgaaccgaaaggccacttgggcgccatggagtaatacaccacaatacaattccaacgatcaaaggccaaataaagcctttataattcactttttctaaagtttttataagaatcccctattctctatggacgatacacatcatcaatgatgtcaaagcctttatctgctaagcttttatctacccaacttaaatcaacttctcctttgctaaaggcaattgctttagcctcatcctgctcatgaaaagcttgtgccttaggcaaaatctcaggagcatctttacgtggaatacaaattactccatcagcatcccctaaaatcacatcacctgggttaacactaacattcccacaagcaacaggtacatttatttcaccaggtccttctttatatggtccacctggggtagtactggttgcataaatcggcagtttccaatttcttaaattatcaatatcacgaattgggccaccaattacaatacctgcaattttcttttgatcgcgtaagtaagacatcattacctcaccaatcaaagatctagtgttatcaccctcgtcgtcgatgacaatcacatcgcctggctggcaatactttaaagccgcataaattgctaagttgtcacccgccctggtgtgaaccgtaaatgctggaccaaccatttcctcatcaggattcgacattaacttaattctaggattcatagcacaatttcgttccatgcaatccgcggtattagaagctgggatctttttaaaaccagctacaacttttggatcaggcatttgcctctttaaataaattctttttcctacaggcatagagtagctctcccctctttatgctccctaatctatcttgttattgttaaacaagcctttttataaaaactaaaactcatcacaactcacaattagtattatacacttatcaacagattaagcggttacaaattttgaattattttgattttttacttattttttgaattatttaaactcaaataattatgcaaaaaaagtgtctgggaaaaaactaattctcagacaggaaaaaagaacgatgatttcctaatggatttcatcgttctttttctatactttaagtgccttccttgatattattgaatcaccacaaaacaaaaagaaagaaggcaatcttaatgtatcaaaattataccataggtcaaacagctttaacactcaacttagacttcgctattcctcataatcatttggctaataccattagctggtttgtcgattcaattccagaagatgtcttattgggtaatactgctaaaaccggtcgtccagcttatcatccagcgatgatgcttaaaatcttgctttttgcttattccagaagagtattttcaggcagaaaaatcgaattaatgctggaagaaaacgtgccgatgatggctttggctgaacaccaacagatttcttaccatactatcaataactttagatccagcaagcatgccaatgagctggttaagaaaagcttcctctactttaccaatttgttagaagccgagggccttatcaatgaaggagcgatctttattgatggcactaaaatcgaagctgacgccaatcgctatacttttgtttggcgcaaggcagttgaaaaatttcatgacaagctcaaaggtcaagcggttgagctttatgatgaattgattgccaaagaagtcgtcaaagcaatggcaaaagagaaagtccagaccagtcaaggtttggcagagctagcacaagaaacggaagccgagattgaaaagctgaccgaagaaattgagcaagaacccaaagcaatccctggcggttcgcctagaaaagcaagaagacgcggtcttaaaaagctgcttcataaactaagaaaagactatgttcctcgaatgaagaaatatgaagaggcgaaagaaatctttgcagggcgtaacagctattctaagacagatcatgacgcgactttcatgcatatgaaggaagatcacatgaagaacggccagctcaagccaggctacaatattcaagctgccaccactgatcaatatgtggttgactttgctttataccctaatccaactgatttcagaactttcgaaccatttttaaagcagatgacgacactagacaagtttgacaagattgtcgctgatgctggttatggcagcgaatataattattcaatgttagaagaagaatattcagacaagaagtactatattccttataccatgtacgaaaaggaaaagaccagaaagcatcgcaacgatccgactaagctggctaactggttctatgatgaaaaagatgattattaccttgatcaaaatggcgtcagattcaacttcaaatattatagtcaacgtaaagatcgatcgactggtcaggttcgtgattttaaggtctatgaagcagatgaatttcaactaacgccagaattagaacgcttagccaagactaagagcggacgccaacgtcaggttcgctataatcctaactggcaatacctaaaagaaaaagccaaagcagttctccaaagtcctgaaggcagacacatctacagcatgaggaaatatgatgtggagccgatttttggacatttgaagaacgtctttggcatgcgccgaactcatttaagaggcaaaaagaaggttgaaacagatataggaatagccttcatgatgatgaatttaagcaaatattggaacagaagatggtcaaaagaccaattttctttgttcaaaaataaaaatagacagaaaaagacggtcaagcaactcaaattaagagttggattgatcgtctttcagtatctaagggttagttttttcccagacactttacttgatctttgttattttgatcttattcaccaaagttttcccaaggcattacgtcaacagccggttgatcaactaactcttgcaattcctttggcaaaaattccttcttcacaatcacatcgtaaacatattgttcaaaccaagcttgactcatttcgtagaagcccttgtgaccaaacttgtcgccccatgagttttcaaccttccacttacggatatgaccgttgtcttcatcaacaccgactaaagtcatatcgtgagtagcaaagccctcaccagtattcaaacgatcagccttgctcatttgcgtatcaacgtcaaataattggtcagtcttgtacaattcagtatccaaaaagccagtttttctttccatttgcttcaagacatcgttaccaaagctaactgcttcacctgacttaagttgagctactgcagcttgagctaagtattcaattggcacattcaagtatttgacttgatcgccgccagccacattgtcataaagtggcaagtggtaaaccttgttatattcatggttaggaatgttggataaagcaacataatcatcgaagttgaagtccttaaagtatttttgaacaaatgcttgtggagtcaaatcacgctccaaatggtacttcttatcatcatcacggtattccaaatcaaatttctttggtggttcacccaaggcaactgataccatgcgataaatttcgttcaagaattccttcttggtcttttctgcttcatccctcttgccttcattaactaatttacgcaaaacaagagcgtcttttctctccttacgagctaagttttcggctaaagcagtagtattattagtattaaagctttctggcattgcatatgaaggtaccacgccatactttttaactaaattaatggccatggtccaaaggccaccatcttcaccggcaaactcaagccatgcttgaacatgacgatcagttaaaggtttatctgccaaacgaataattgcattgtaaaaagcgttagcacgttcaatcttgtcccagaagaaattataagcttgtgagaacgtaaaatccttgaccttgttttccttgccaaagtagtggcgcaaaacattcaaagtagtgaattcccagcaacgaccagaatgcttctgatcagttacaccgccaatatcaagttcagttgaaaagacatggttaagtcgttctgatacgcggtcattaaatgaagcttcaagcaaaccactacgacgagcagcacgagaagctactttattctcaggattagaattaaagctttcagaaaagccttcaatttcttgttgtgaaataactgtcatgatatacctcgttaattcttatcttttaattttttattaatcttttcttatataatactattttctagcttttttgtcattaagaaaaagtcctagtttttgacaactagggcttttaataaaattaatgatcaattaaaggtttatacctgacaaaacttcttgcatcttgtctgctgagttaatcatcttagcatgctcagtatcggaaagcttagtttcaattaccttttcgatcccttcaccgttaataacggttggggtacctaagtaaagatcatgcttaataccgtattcaccattaatcggagctgaaagtggcaaacaaattgcacgattgtccaaaatagctgagacaatttgagtaagcatcattgcaacaccgtagaatgtagcacctttgttggcaatgatcttgccacctttcttacgcacatcggtctcaatttctgctagaacatcatcgttgatttctgagtaatcacggagtgccttaccagcaactgttgattcatcaaagttttcaaaactagtatcaccgtgttcaccaagaaccattgagttaaccttagcaactgggacattcaaacgctttgaaagttcaacacgaagacgcattgaatcaagtgaagtaccagtaccaattacacggttcttagggaaaccagacaacttttgggtcaaagtcgtcaaaatgtcaactgggtttgcggaaacaacaaagacaccattaaatcctgattcaactactggcttaacaatactttccaaaatcttaacgttcttgttaaccaagtcaagtctagtttcacctggcttacgaggaacaccagcagtgatcacacaaacgtcagcatctttagcatcactataatcggctgcaggatgaatattggtttgacccataaatggcgtaatatcttcaaggtccattgaatcaccaacaggacgatccttagctacatcaaaaattgctaattcatcaacaattgtattttgcaataagtcatttgcaaaagttgaaccaacagcaccatcaccaacaagaaatacttttctactcataagttaaattagtcctttcaaatgtttataaactgttttttatctacatgattaattatacactaagcgctttcattagacacgatttattccataattataaattataatatcccatcaaaatctcgccagtgttattatttctatcgaaaaagagcagttaaccaaccgctctctttacataatctttcttatattatttactttcacgaacatatttagccatctgaatacctgcttgacgaccaaaaataactgtttcggcaattgagttaccaccaattcgattatttccatgaagtccgccagatacttcaccagctgcaaataatccatcaattacattaccattagtatcaagtacttgagtttcagtattaatatgaataccacccatagtatagtgaattgctggatgaacatgaattgcaaagtatggaccacgatccagttcacgatccatcccagtcgttctgccaaattctttatccttaccagttgcaacggacttattccaagcggcaatggtcttttctaagttggcaccatttacgccaatttttttagctaaatcagccaaatcagtaccatgttctactaaaccaatctggtcataaaactcaactgcagcaaaatgagcccgtacacctgagtcaaaaatcaagtatgccccatcttcatgcaaattagtaattgcactagaaacaatctttcgtgtacttaattcattaacaaaacgttgaccattcttgttaactaagatagcaccttcaccgcgcagaccttcaccaattaaataaacatgcggattatcagtatctgcagttgggtgaacctgaatgaagttcatttgcattagttgagcatcaagtgcttcagcaagcttcagtccatcgcctgtagcccctggctgattagtagtcttatagtcaactaagtctggacgatacttcttaatgatatccttggaagcaccaaagccaccagtagctaaaagaaccaccttagctttaactgttttaatgccatctggtgtctcaacttcaacaccattaacgcgcttcttagcatcttgcaacaacttggtaactttagcaccagtaaagatgtcaatacccgcttttttcacctgtgttgtcattcgtgaagttagataaaatccaactggttccattgaagcaggacggtgagcacgtttcttactcatccctcctgtaatggtcaaatcagttaaacgaataccatatttcatcaaccatgaaatagctaaagcagagtggttaacaaagtacttcaacatggcacggtcatttaataaacctccaccttttaaagtttcttcatagaagtcacggttattatcaatgatcccttcgtcaagctgaaccaaagattcagaagcgttcattccacttgaagcacgactagtgttaccaccagttttctcatttttttcaagcacaacaacatttagacctagttcatgagcttgaagtgcagcagtcagacctgctccgcctgagccaacaacgatagcatcatatttattctttaattcttttgtatttggcatttcttactttccctattcttctggagtagacttatcaacattagtcatttgcatatagtccatccattcatcatattgttcttcagtaactttaccactcttcaaagcagcttctcttaaagtagtgccttctttatcagcagtttgcgcaatcttagcagcagcatgatagccaatatgtggcgacaaggcagtaacggtcattaatgaattctcaagtaattcatccattctttcttcattaaccgttaagccatgaatcattttatcagcaaaaccagtaattgtaccagttaaaatatcacaactatctaagaatgatgcaatgatgactgtcttgaagacgttcatttcaaaattaccttgactagaagcaaaggtaatggtggtgtcattaccaaatactttagcagcagccattgtcacagcctctgcctgagttgggttaactttacctggcataatacttgaacctggctcatttgctggaatatttaattcatggtagcccgctctcggacctgaagcaagtaaacgaatatcttgcgcaatcttaaacatatcagcagccaatgttttaagggcaccatgaactacatcaagacctgaatggtgagctaagccccagaatttattagttttaacttcaaatttatgaccatagacttctgataatttaccagcaattttttcggtcattcccggtgctgcattcaagccagtccctacagcagtcccaccaatagctaattcgtagagagttggcttcaattcacgaatatatgataagtcatgtttaagagcagaaatatagccagataattcttgaccaaaagtcaaaggcgttgcgtcttgtaagtgggttcgaccaactttaacagtcttccaatatttcttttctttaacaactaattcatcaattaagtgttgaattgctggttccaacttgtccaatgcttcaacggcaacaatattcattgcagttggataagtatcattagatgattgaccacggttaacatcatcattaggcaaaatatctaaacctgggtgcaatttattagccaagttagctacaacttcgttaacgttcatgttgctttgagtacctgaaccggtttgcaaaacatgaagtgggaagtccttacgcaagtcagtatcgcttaaagctagcaaatgatcaattgcatcttcaattgcttcgcctttttcttttggttcatcgccaacttcaacgttactttctgcagctgccttctttaagtgtaaaaatgctcgaataatttgcaatggcatcaattcaccacttgggaagttattgcggcttctttcagtttgagggccccataaagcatttttagggatcttaactggaccaatagtgtcactttcaacacggtattcttcttcgctcatattatattcctccttattaagctctataaggtttgcgttaattatcaatcaccatttataatacctgtaaaggctttctttttcaatttcattccaaaaaaagacccaggatttttcctggatcatagttttatctagactggtgattcattcttttagcaaagaagtcaccaatgatttgaacgataaaaatcaaaataattactaatacagtagctactaaagtaacatcattattgaatcggttataaccgtatgaaatagcggtattacctaaaccaccggcacctacagcaccagccattgcagtcaaaccaatcaaagaaataatcgtcaccgtcgaaacacgaatcagttctgagcgagattctcttaaataaacatcaaagataatatcacgcgcagttgagcccaaactttctgcggcttcaaccttacctgggtcaacactttctaaagcaacttgcacctgacgagcataaaatggaaatacgcctaaagttaatggtactaaggctgccttcattccgatctgtgtacctacaattttttgagtaactggtgcaacaaaggcaagcaggataatgaacggaatcgctctgaagattgaaactagcttatctgagaaattgtaccagaatttattgggccgaatcccgccatccttagttaaaactaaaatcacgccaaagataataccaagaatgccaccaaagatagctgaccaaaaagtcataaataaggtctgaaaaatactagtgccccagccagcgtctccgccccagccaagttgaacaacattgggtaaatatttacttaagaaactaatcatgatatacattccccttttcatctaaacgtgtaaatgtcacattttgcttagccaaaaattcttgtgtttgcttttgcttagctggatcgcctttcaccaataccaccaaagtaccaattggctcttcattcaaaagttcaacattcccataaagcattgaaacttctacgccaatttgcttatacaattcaataatgattgatttagtcacattagctacgctgtaaactaattgataaattgcttcatttttgccaagcttatcaagcgccaatgaattcaaagtagaaatcgcttcaagtgatccaccaacaaacttcttggttaaatcctgcttaggatgtaagaagacatctcgcaaactgccgtcttcaatcacattgccgtgttccatgacggcgaccttagtggcaatcttcttaacagcatccatttcgtgcgtgattaagatgaccgttaagtggaactttttgttcaaacgcttaagcaggtccaagatttgttgcgtattttgtgggtccaaggcactggttgcttcatcagagatcaaaatatctggattattagccaaagctctagcaatcgctactctttgttgttgcccaccagataattcagctggataaaagtcagccttatcttttaagtcaaccagatcaagcagttccaatgaccgtttttctaattcctcatcactcaacttttcatgttttaaggcaaaggctacattttctaatacagtcgtttcatttaataggttaaaaccctggaagatcattccgatgtttctgcgctttaattgcaattctttattagaaatcacctgcttgccatctttaacaaattcagtgccatcaacggtaatactaccggcagttggtttttgtaaaagattgaccgttctaactaaagttgacttgccggcaccagagaagcctacaattccataaatgtcgcctttttcaatggaaagagaaacattattcactgctttaactggttcgcccttcttctgagggaaggccacttctacatttttcaattcaacaatactcatttttgatcctccttacttcaacttaacgtcccaggctgcaatttgcgtattgccatagtattccttagttagcttcttagtttctgcagtttggtaagccttgacgacatcttggtaaagcttgtccttttgtttgccttgtttgacacaaagaatgttaatccattgttttgaatctttgttaattggttcaatgtaaatcgtttgcttatcagtcaagccagcaggaccagcataatcattatttactacagaagcgtcaactgaattcaatactcgaccagtttgttcagcaccgatttccttaatcttgtagttatttggattgctggtgatatcagctacagtaactaaggtcttacccttcttcaacttaattaagccggcatttttcaaaacaaacagtgctcttgattcgttagtagcatcgttaggcactgcaatcgtggcaccatcaggtaagtcactcaatttatgatacttgcgtgaataaagtctgatcggtgcgatgtaggttctaccaatggcgacaacgccaccgtgatttgccttattccaatcctttaagaaggcatagtgttgaaaagcattcatgtcaatatcgcccgacttcaaggccttgttaggttggttgtaatccgtaaagttcttagtttttaaggtaataccatatttttccttagccgttttagcaattgacttccaaattgcggcttcggctttactttccccaacgattccgactgtaacagtttttgcctgattttgactgggaattcctggaccaaaactaaaccaacctgcaatcacgatcagtatcccaatgatcgtccaaataatggtatttcttcttctccgttttctcataaaatacactcctactttgataaaaataaaaaagcacccatccccaaaggacgagtgctcgcgttaccacctttaattcgctgatcacttacgtaatcaacctcactggctatcaaaaaatagcctgcactgttaacggatgcagccccgccgatagctaaatatcaccaccggtcatcgttccaaacccatattcactagctcctatttgccaactttcaccaccacgctggctctctttatcaatagaagttctagttactcagtccttcaagatgttgttttcttgatttgttataaataagttatcatcttcttttaatctagtcaacatcttttttaatttttattagataaaagcgatttcattgtataattaggatatagttaaataatttatttttgctaaggagaaaaaatgaagaaaaatcgctttcgaagttttgctctctcattagctgcagcaattggattcatttcttttgctaatactaatgtcccatgcaacaatcaaaccgtctatgctgtttcagataaagcattagtcaatttgaaataccacaacaaagaaattgtgaccgttgatcatgatcagccgcagttttctaagagtacactgagcaagaaaaaaggtccatggcaaaaatatggccaattagattatttgaaccgagctcatgctgctaatgctttactaaataaaagattaatgccacatagtcagcgtgcggctttaacttggaatccgaccggctggcataataaacgaatcgctagtggttggttgtataatcggtgccatctaatcggctatcagttgactggtcaaaacaacaatccacgcaatttgattaccggtacgcgtgaattaaatgatccagatatgcttaaatatgaaaatgaggttgctgaatatttacgtagttcgagcaaaaactatgtccgctatcgggttactccaatatttaaagggaatgacctattagctaacggcgttgaaatggaagccgaagcaactagcaaaaacgggcctcgctttaatgtctacatttttaatgagcaacctggtatgttgcttaattacaagaccggtacttctaaggttaaacataggtctagtactattgctgaacatgtaaaatctagaaaacgatccacttctcgagtaaccaagaaacgaaccattcaccatatcaaaggtactgtatccactgcagaacaccgagtcgttggcaatcgtcgcagtaagatctaccatgtaatgaatgggcaaaattatcatatgtcatcagctaatgcagtttacttcaacagtgaagctgccgcacaagctgctggatatcgaaaatcattaaggtagtaaaaaagtcagagcaaaactctggctttttcattatcttcttatttcacattatttttgccacgatcatatgcttccttgaattccacaaaagtcatgttctttcctttttgatcaaagacaaccaacacttcggcgattccatccaaaattttagataaccatctaaagatagtcactgccgcacagaataagaccgccaaaataaataatgatttgttattaagcattgtcaatgagaacaatctttggaaaaagatagttgagccaataatacagataactgataagcccataacagcaagtctaaatttgtttattggtgccgaaatatgatacatcaccataaaaccaactaagactagcaacatagtcgctgtcgtgcctacctgaccatgatcaagtgagatagaggcccctgcaatgactaaaattgcaactgccagccaatctgttaagccccctggaattgcccgagctaaaacatttggcataaactttccacgaattcgcttgtgattgctttctaaggccaataaaaacgacggcaagccaattgtaaatgcagagatcaatgtgatctgggctggctgcagcggataattgattgtcataatcaaagagaagatggccatcaagaatgaaaaaatgtttttcaccaagaacaagctggctgaacgttgaatgttattaactacttgcctgccttggttcaccactaacggcattttagcaaaattagaatcgagcaaaaccacttgtgaagcttgcactgcagcactattaccagaagccatagcgattgagcaatccgcctttttcatcgctaaaatatcgttaactccgtcaccagtcatggctacggtattaccttgattttgcaaagcaacgacaaactttcgcttttgatcaggcttaacccggccaaagacattatagttttgcacggcctgctcatattcaccatctttaatggtttgcgcatcgatatacttatctgccccattaattccagcttgcttagctactcgagcaacggttaccggattatccccagaaataaccttgatatcaacaccttgctggttaaaatattgaaaagttgacttggcttctttacgaattggattcgacaataaaatataaccgagaacttgtacattttcctttaaggcggaattatcttcagttaatacgccaggataattagccgcaatcaacacccggtagccttctgccgcatatttttcaaattcagtttgatattgcgcaaattgatcacgcaaaaccatttcaggcgcaccaattaaagttgtctgattgccaaaaattacaccagaatatttattgactgaggtaaaaggcaaaacgctatccgccgttttggttccatctttaaaataggcttgaatcgccttcatcgtcgcgttatcagctggcatgtttttagcaaaatccgcaatgatgctacttaaatcaccagtaaaattcttgctactaacagctttttctacggccatcttcggttcggtaattgttcccgttttatctacacaaaggacatttactcgggctaaagtttcaacactcttcatatcgtgcagcattacttcttgtcgcgctaatcgcatagcagctagagctaaggcaatcgtagtcaataaatatagcccttctggaatcatcccaattaaagcagcttccatggaagtgatactacgcttgagtccaatattattcaaaaagaaactctgactaaatagggcaattcccaccggaataatgatgatgccgacccatttaaccagacgattgattgaacgcaccatttcagattgttcaacactgcccattgcctttgctttgatcgttaatttagaaatatatgagtctttacccactttttctaagacggcataagccttaccggaaactacaaaagaacctgacattaattctgcgtctttagtcttagtgatttcatcagattcacctgtcaacaaggcttcattaacccgcagctcacctgagattacccgcgcatcagctggaatctggtcaccagtttgtaaaagaatgacatcatcttgaaccaatttttcgatgggaattttttcttcttgcccatcacgcaccgcgataatttccgtcgcattcatcacgtttaacttgcttaaaacttttttagcacgaagctcctgcacaataccgataatcgtgtttaaaacaatcactggtaaaaaagtcagatcgttccaggcaccaacaaacaccaatagcacagccaaaatagcaaaaatcaagttaaaataagtaaagacattttctcgaattatttgagtagctgttttggactggtcatcaatggcttgattaacctgtccattttgaattctttgatcaacttcagcttgagttaatcccgttatttgtttatctgtcataattttctgtcctatactgaaaatactttcatccattatagcgaaaaataaaaaagccacgcaactctgcgagactttttaacaattatttattttttctatgataacttaaaaaagtatagtcatacttgttcttttcatcatgatgatgctcttcgcgactaactaattcaaaatcatcatagttaatcgctggcatcactgtatcagttttaaaattagctttgatctctgttttttctaaaagatcaacttgatcaagtaacgccctaaagattgaaactccaccaattgcacagatttcttcagtctgatgttgacgaagatattcatttaattcagctaatgtggacacaatcttcacttgctcattacccgcatatttttgctttaattcttgacgatgagttaaaacaatatgttttctctctggtaacaagtgaggcaaactcgcaaaggtttttcgccccatgatgatcggatgacctatggtctttttcttaaaatgcttcaagtcagccggcagattccaaggcaaatggccatcgatgccaataccatgctgctgatcttcagcccaaacaaaacttaacattgagacctcctaaactgcaaccggtgccttgatcgtgccatggtgctgataattcagcactttgatatctttcatttcaaagtcttcaatgtgctttttttcaggattaagccacaattcaggtgaatcatatggcgtccgactcagcaattcctttacttggctaaagtggttgcgataaatatgtgcatcccctaaagtatgtacaaattcacccacttttaagccggtttcacgcgcaatcatgttcaagagcagcgaatatgaagcaatattaaatggcacgcctaaaaacatatcaccacttctttgataaagctgcacgctaattttgccatcgactacataaaattggaacatgacatggcatggtggcaaagcactagttggcacatcttccggattccaggccgtgacaatcattctacgagaatctggcgtttccttaatttgcttaatcacgtcagcaatttgatcgataaaaccgcctgtccgctttttccaatgacgccattgtgccccatagacatcacctaagttgccatatttctgggcaaaagcaggatcatcaagaatgcgctgatcaaatttcttcatttctgcttgataaacttgattaaattctggatcactttgactacgcaagccaaaatctgtcatatcagccccctgatattcagcactttcaatccaatttttaaaggcccattcatcccaaatataattgttatgctctaacaaaaagcgaatattagtatcgccccgtaagaaccacaataattcacttttaattaaaccaaacggcactttcttagtcgttaaaagtggaaagccctgtgtcaaatcaaaacgcatttgggcaccaaaatatgatctagttccagtaccagttcgatcatccttgtcatgtccttcagtcataattttttctaacaaatccaaatatggttgttcaagaattgccattatcttcacctttcaaaaaacatttcttctaacataccatagatcttgcatgttagataatgaaaaaccatagatttagtgtttttagataaaaataaaaaggtgaataatcaccttaattacttttcttaaattcatttttgtgtctaactaagtagacgattgttgccacaatcaggactaatgcccctgcgataactgaaattctcgtatcaggattgataaacatgaaaattacaatcattatcaacattgcaaaggcaaagtaatttgaaaatggatataacggcaatttaaatggatgatcttgcatcgcttctttgttatgccgtctaaatcttaattcagctaataaaatcacaaaccaaggaatcattcctggtaaaacagatgaactgaagacaattacaaataaatcactagctgaatgattaaattgtgaagcaattacgttcaagacaaaaccaataaaaataccagcagaaatccccataattgcacgatcaggtacaattcgcttagaaatatgcttaaaaattcccggtgcttcgtggtcatgagacagcttaaacaacattctgctggaagaataaatccctgagttagcaccagaaagagcagccgttaaaacaacgaagttaataattgaagcagctgcagtaattcctactttagcaaaagtggttacaaatggtgaacccaggctatttaatttattccatggataaatcgtaacaattacaaaaattgctcctacatagaaaatcaggattctaagcaaaacggacttgacacttttgataattgctttttgtgggttagctacttcaccagcagagatacctaataattcaatgccttcatatgaaccaacaataattgacattgagaagaaaaagccttttactccccctgtaaagaaaccaccgtgagaccataaattgctaaagccagttgggtggccgccattacctacaccaaagaaaataacgataaagcctaaaataatcattaaaataatcgttattactttgatcatggcaaaccaaaattctagtgatgcataagccttagcactagctaaattggctagtagtaaaaaggcaataatgatgatccccgaccacagcgccgaaatattcggccaccaatacttcagatattcagttgccgcgactacttcggacattcctactacaatatattcaaagacattggcccacatcgctaaatagcctgctaagggatgcacatattctgttgcataatcagcaaatgaacctgtccctggattgatataaagcatctcacctaatgcccgcattacaatatataaaatcaaccccacaaacatgtaggctaataatactgacggaccggtccatttaatagtcgaggttgaccccataaacaaaccaacaccgatagcaccgccaagagagatcatttccatttgacctgctgtcattgttcgtttgagttgaggagctttagattttttattcaattttcacaactccaataattaatctatcctaattaataatccgcaattaatttactggttaaatcaccattttgtcaaggttcaaattaaaaatattaatatttgggagttttttctctaattgattttttattcttttattaaatgaatttcgcgatcaaacatttcctgcatctgtttattaaaattgtgagcaataaagacaattgtggtcttgctttttaataatttttgtaaaatatccatagtcgctgtctgatcaattgcactagttccttcatcaatcaaaataatgtcactaccatggatcttcgatcttgccaatacgatcttttgtcgttgacctccggaaatattcaaattatccaagtcaattttttcatcgacacctgctttaaactttttaatatcggccgcaaaattaacttcatcaagcacttgagctacttgattattaagttgcttgttgaacattgtaatgttttctttaattgtacccggaaataggttcggctcttgtggaatatagcctattcttgacatattaggcttaattgtcaaaccttgactattttgaaattcaactttacctgcactaggcttaagttcacctaaaatcaatttaaataaagtagacttacctgcacctgaatctccggttaataagatcttttcaccaggtttaactgcaatatcaggaaaagtaagcttttcaccattaggatactgcaaagccaaatcttttgttgaaaatgctactggtgtctcttcttggccagctttaactttttcaatcacagtagcatcaccatcaacttgtttcattaaatcctgtgacgatttcataaaacttaatgcctgaattgtttgttgtaagccgatcgaaatattagctgcaaagttttggacagacataattgcaccaaaaatcactaaattcttagtgatcaaaaaagccgtcaaagacaacaggattatttgtcctaccatgttacagatcccattcaaaataattaattgctgttgagcagccgtttgtttaacatgagcctgttctactttacttgaagttttttcacctacctgaaataacttagcaccagcaaaatatcttcttaattcttctaagccagagaaccatttagctaaaacatctagataatgcttattttgctcagaaacattattagttgcttgttccattttcttttgtactaatttaggtacaaagtaagaaacaatatcaatcactacactagtcaaaaagattgaccaattaattgtaagtagagccaccaatgccgcaacaaacattgagccatagaacggcacaattggataccaatcaaaataattttttctaatcatttctaaatcattagtcatccgattttgcacggccggtacttgatgattttgaccatctctaaagtaatgtgtagccaaacgagcgcgcacctttttattatattcttcttcctgcactcgaattacaaattggatataatagatcatcccttgagcagctaaatataaaatccccattaaagccgtcgcaagtaaaatcttcacccaagcacgatctttgatataagtcagccagtacatttgaatgtagcctgcaccaatagcagcgacacctgaaataactgataaaatattaatgtaaataaatcttaaataattagttttaataaagcctttgaaactcattcggcgtcacctcgattagtcaatttaatttgccgatcaaacattgaaactaattctgtagaataattgtgcgcaatcataattacagtacttggagtattcaataaattttgtaatacttgcttcgtcccagcactgtcaattgcactagtcccttcatcaatcaatagccaaggtgattgatgaatcaaagctctggctaacacaagcttctgcctttgtcctccagataaatttcctttatccaaatcaatttgactattaagtccagcagacatcttatccaaatccttggtaaaacctacttgatctaatacacctgaaatttgattatttaaagcactattaaacatcgtgatattattggcaattgtgtcaggaaacaaggtattatcttgagcaatatagcctaattcatcaagatcaaaatttaatttttgaccattatgatcaaaaaaaatgatctcaccttggctgggcgttaatttacctaaaattaatttaaataaagttgacttgccagttccactatcaccagtaagcaagattttttcaccttgcttaactgtaaaatctgggtaagataaatactcaccatttttgaattgtaaggccagatcttttacttctagcctgttaatcttcttaacttgatgctgatctggagctatttttactggagcttgaagattagtaatttccttattcaaatccttggtagatttaattaaattccattccgttacaaatgctgaaacaccattcattacagttgaactaaattgaatagtagtaattaccgcaccaaaaacaatttgtccttgcaaatataagtaagcacataaaaccatcaagagcatttgtcccacaatattaactacaaaggtgatcatatctgcaatagcaatagttgctccttgatgaatagctgcttttttatattcgtctgcgctttggttaactgattcactaaatatattaaaactggcatatcttcgtaattcatccagaccactcatccacttggctaaagtgtttaagaacttttcatttttcttagtaacctttattgtggccgatgaagtcattttttcaaaagttttaggcaaaaataatgaaattgcagttaaaatcaccgtcattactactaaaagccagttaaatgaaaacaaaattccaattgagaaaagcacagacaacaagtacataaaaccgtttttgattggttttaaataattctgtgttagctgatcaagattggcaaccaattcattttgcactttagcagtttgggcaatttcatttttaaaaaagtagcgactaatttttacacgaatttgatgcaaataagattgtgattgctttccgtataaataatctgaactagtaatcaaggctaatctaactagatcacagccaatagccaaacaaataaaaataataaagccaaataaattcattttctttagctggttaaaggccggggtcatcaaatattgcgaagcagcatcaacggttgtaccaatgataaccattagaaaaattaaaatgaatttagctttattgaccttaaaaatctctgtaatactcatttgtctcatctccaagcaaattaaaatattaaaaatatcttatttatgtttaatattactgctatttttttaatattcaattactttttactaagtggttaaaaaaataacttgaacggcaaaattattactacatctagctaatcctttaagaaaaattggcaaaaaaatagactagaaactcattatcaagcttctagcccattagtttaattcaattattaacggtaattcttcaagaaatccatcatcttttgataagctgcatcatgatctgcatcatatgcatcgactacatcgactactttattatccttagtaataatacggtactcacgtaagtctttcttttcattagcaacaactgtaatctcacccttacctggggtagagaacaattctggattaagttcttcgttcaacttatctgataattgttggttaaatgcgattgtattcatttttgtttttatctcttttctaaaaaatccaacacagacattatatcattattagataacgttgatgaatttagttttattttttatcaaggagaactgtacctgcagaaggattatgatcaattgcaccaatgatggagcagtaacaccttcaatatagcacagcaatacttattcccaaaatatcaatttgttattttgccttattacttttacgtatagatttcacttaattaaatgcacaacaagcatggcaattcctaagaagacaaaaattaaggcaacaatcatactagttactgtgccggtaactaaacctaaaatgatcatgccaataattgaataaatattcatttgttatccctttaattaaacaataacagcagtatttacttttattatgtagcatgaacactttaaaatacaattttaacgtattttaatttgctaactttcgatataagaaactgtcaaatcttttgtgtaaatagatctttctcgtaaattgattttttaattatttatttaatcaaagtaggattctaaggtgtcctgaacctgaccaaagcctttatgaattcgattgaaataacggtcattgtagctcattgcctggatgccaataaatgcatcaagcgactgttcagttggaaattctgccttaggcttagctttacgcttgatgacgttgttaaaggattcaatcatattggttgaataaattgaagctctgatttgtttgggataattgtagaagactagcagatcgggctcaatttccttcaaacctttgatgacatggctataagctttattccatttggcatagaatttgtgcaagacagctgcagcttcttttttgcttgtctgttgatgtatctgcttgaattcgttcatgatcttttcacgatcgtcgacgcgtactttagcgcagatattgcgcatgacatgaaccaggcagcgttgaaaatgagctttaggataagtcctggccaaggctgttttcatgccaacaacaccatcagaaagaaaaagctcaacttgcttcaagcctctggacttcatgttttgaagcatctctgtccaaacttcaatgttctcactaggagcaatgcagtagtcaatgacttccttatgtccattaggtttaatgccaatggcaatatatactgcttcacgctcaaacgtttctcggcgcaaaggaaggtatgtcgcatccaaatagacacagaaaaacttgtcgcttagcttgcgcttgtgataagcctcaatcttggggagcatctgcttggaaatatttgatacttgagctggactataatgactgccatacattttctcaatcaagtcagcgatttctctggtagttacgcctttggagtatagcttgataatcgtgctttccaaaacatcagagtgctgcttgtagtcaggcagcgtgtgctgatgaaactgaccgttgcggtctcgaggcacttgcacttcaattggtccaaactgggtatcaaccttgcggaaataagcaccatttctagaattgccagtattccagccatttctggcatagggatcatagcctagaaaggcagtcaactcagcttctagcaagttattaacagcctgttgtagctctttgcgcaataaatcatttattttgtctggattgaatagagcttgagcaaaatctttggtaaaatcattcatgaaggagttcttctttctgtatgtgtttttttgttcaaaccaatcatacgagaaaggaactcctttttctaatgtttaaagaaataaatttaaggaatcattcatccttacacaaaatattttacggtctctttgttttattctaaatcaaaataactattataaaaaatattcattggtaatagttagctatgcataaagcgaatgaatgaagattattaattagctattacgtttcttaatttggcgattttgtgttaacttgattgttatccaaataacaacgtatgaaagaataaaaataagcaatgtccaaatattgatagaccaattatttaacatcatcattattgagaataagctaaaagttccaattaacataagaagtcttcctttccgaattcactatttaaatacgtggttaaattcaaaatacaagatgttaaaattcaaaagtaaaattttagattctaaaaattaatatctgtaagctaaatatttaagttactgaactgagtttgctatatttaagttaaaagataataaaaggaggaatttcatgaaagttacttttaaaggaaaagaagttgaattaattggcacaccacctaaggttggcgatgaaatgcctaattttacagttttaaacaaaaataagcaagaagctactaaagatagtttattaggtaaaaatactttgatcagtgttgtaccagatatcaacacacctgtctgcagtattcaaactaagacttttaacaaaacaatggatcagtttcctgacgttaactttttaactatttcgactaacactatccaagatcaacaaaattggtgtgcagctgaaggagttaaaaatatgcaattgctgtctgatgaaaatctatccttgggcaaggcaactggcttgttgattccagactctggaattttagcacgcagtgtttgaattcttgatcctaacggtaaaatcgtttatcgtgaaattgttgatgaaattactcatgagccaaactatgatgctgccataaatgaattgaagaaattgatgtaaaaattttaaatacatggaaaaacgattactctaacttaaatgcttaggtaattgttttaatcgtattttttaatactaataggcatagaaacaaaaagtggttctttgctagcaaaatatcagagatattccttaattttacttaaccgtaactaccctactatgcttaaaagcataatcagatatttcattaccgactcctggcttgttaggaactgtaaatacaccattgtcaggttcataatcatatttagttaacttaagcatttttggcatctcagtattgacgttatattcatgaatcacaaagttagggagtgctgcttctaagtttagtgacactgcagttgctaaattgcttccggctacatggatttgtacaccaagctcacttgtatctgccatatcgcatatctttttaacttcagttactcctccagccgtgcaaatatctggctgcgcaacttgaatgctattttgatcaaaagcacgcttaaagttccaacgagaatacattctctcaccagaagcaatatttagacctgtttcttgatgaacataacttaatagatcgggatcaggtttcactggttcttcaaaatacaaaatattatattttgacgccatttttccatactgaacagctgataacttatcagttaaagcgtgattttctaaaattaattcgccatcttttcctaaaatatcacgaactgcttttattcgctcttctgctaaatttaaataattattcgataaaaaagcagtctgtttttgccatggaacctgctttcctcgctcgtcaaatgttaagaagttaattttaacggctttaaatcctttttttagggcaattttaacattatctgcatagtcttgaggtgtcgctgctggccttcttgattctccccaccccatttgtagctgactagcatatgcttttaaatgatctcgttgttttccaccaagcagttcccacagcgcagtatgataatattttcctttaatatcccataaggcaatatcaaaagcagaaatagcgccaaaaattaccggacctgcgtttttaccaaagaagctatttctgtacattttttgccagatgacctcatgctctaatggattcatcccgattaacataggagccaattctttcatttcagcaaaagcagcctcttttgctccgccatatgataaagcaacttcaccatcaccataaattccgctatcagtatagatacggcaaaaagaaggtcgccaattatcttcaactggatcaccatataatagatcgattttagttattttcatttttcctctttacttaacctaaataaaaaaatatcaaactaaaccgtttgatatttttaatattctatcctacaactgaaaagattctaacttctggatcagcagtccaagtaggtttcaaacctggaaaaacatgcttggtaaacatttcactctttagatagtcttctgcatgttcaattgaatcaaatccatgcaatacctgcacatcttcattgcgtacaagtaatgccttactttcagcacctggaattgtttctaaaaatggtttacggtaatcactataaacctttgcagctgcctttctgttttctgctggaatctgcattgtaatttctaaataagcttttactgccatatcaattttcctttctgctttaatcaacttacatttttatagtaagataaagctgaaaagatttacatattttaaaaagagctttagctactaaagaattattgagtgaggttaattatgtatcaaagaaaattaccaaaagaatactattgtactgttgattatgcattagatatttttggtggcaaatggaaaccaaggttgttatgtatcttaggacataaaaaggctatgaggtatagagaaataaaagatcaaatggaaaatatctctgatgcagcactagcggattcgcttaaagaattgcaacaacaagatatcgttgaaagaaaacaatataatgaaatgccaattcgggtggaatattcatcaacaaataagggaaagacgcttctgccagttttaaatacaatttcaaattgggctatcaaaaatagcacccctgatatgtataaagggatgcattttaaggatgtacataaggacttgtttaaatagactttactaattaaaattcaaacacttcaatcccatgacacgctgggtatcttaaacaatgcagatttattccttatattgttccattctttgattaagttcttccttatcaaacttatctaaatcaattgcttctccacccattaaccaatcaatcatttcaggatctactttatctttaggcgtatcgtaataatcttgcaaagaccatacaccaccaatgtcatcaattattccataaccttttccagaaagtatctttggacacttaggagctgcttgatcagtagtgatgttcttaatatctacttcgaattcccagctatcgccataatcataagttaataataatttatctctcttttcaaaatacgaaaccttagctttttcataatctatgcctgtagccggatcccaatctttcgcttcagcgatactttctgcattttcaaagcgttcctgcgtttttttattcagcaaatcaaacatatgtccaaaatctgcattaaacatatctagcatagcaacttctaatgttttcactgacgtattgccactaataataaatctacgccaagtagatggtttaaaagactttagttttactctaatttcataggtagctcgattgcgagtttgattttcaaaaattgtcttttttcgtgttttctgctttttatcatgactctcaagatcttttcgcaagccttctaaaattctagacaaatcctgaggagacagatctaaatcttcaagttccaaaatctttttcggatttgcttcaattgccgctatcatgtcgtttatcaaatcctcatccaggctttgatcggagtatgaattaatttcttcaactacccagtcaatattcatccctatttctttactatcagttttacgaataagacctactctactcaaaaatacatagaaatttttcaaagtatttgtaatctgctctatttctagcggatgtagtttattgttagatatcataatccataaataagaaatcgcttctcctaaatcattagcaactaaatggatcttattacgtaataaataatgatttagataatccggcagcatttgatcaggttggatatatcctatttctgctggtacatatttagcatattgatcaatgagtttctgattattttctttaattttagcaacaatcttttcattgccttttactgatttattttcatatttttcaaaattagagaaatcttcaaattttggcactaagtcaacatacttatatcttcgatttggtttttgcggcttaataggaaaatacgtactaacctcatcaatcatcttagaaataaaattttgtccaatctgactatccaaggcaaaaatagtcgctgacattacagttagcttatctaccatattcttttcatcttttacaacatcaatcaaatttaaatattcgctttgattatcctctataagtttacgaattttttctagcattaaactagcttggcttttagtatcgtaaaaagacatttgcttggactttaccgctgaaactaatttttgttgctgtttaaacaaaataaagtcatagcttttaatcgcattagcaaaaacattattaaatagcttggcatcaagtttagttaataaaattggaaaactagtgtctttttcaactaataaatagtacttttgcttttgaatatttattacacctgcatcccaaatagtaaaaggctcattcttaataatatcaatcttattttctttaatttctggtgctaagttaataccgtatcgtacttgaagcatgtggttctccttattaaaataatttcattttaattttatcatgtctattcacaactattcatctcagaagcaaaaaaatgaagtcaatcactgccttcatctaaaatacacaaattttagtcttcttctaaaaccggtactgtctttttatttctaacatgatatacaactaaaccaattgctaaacctaccagtgctggcactaaccatgataagcccatgctgacaagtggcaaatgacttctaagtgaagctactgctaaaccgaatgaactttgactaactacacttgggaaagcaaccaccatatcgcctaaggctggcacaacagtaaataggattacgaaaaagtaaactacaccttccttattaaacaatggtgaacaaactgatagcaagatcaaaaccatggataaaggatataagaacattaacatcggtgttgaccatgaaatgatttgatccaaaccaaagttagcggttaagaatgatgccaagcaactaagtgctaaccaaacgtggtaacttaccttaggaaaatgcttatgaaagtcttgcgcaaaagcagcaaccaaaccaactgcagtagtcaaacaggtaactgtcaataagaatgcaagtaaagcttgaccaaagacaccgccataaacgttaacgatttggttaaaggctaccccaccgttatcagaaactgcaaagcgtccgagtgacattgcacccattaagatcaataacaagtagataaaaccgatttctaaaacggccaagacacctgatttagcaacaacttttgaaacacttttagcatctttttgtcccatgccgcgaacagctgtaacaaccgtgaccccaaaggctaagcctgctaaggcatccattgtgttataaccttctaagaagccatttactaatgctccatgcttataagctgcagttactgctgcagtttgtggattacccaacggacgagcaaaagctacaagaaacactaggaataataatgctaagaataatgggtttaataccttaccaacgttagacaagatattattttgatgataagaaaaagcaaaagcagctaaaaagaataaagctgaaaaaacaagtaaagcggaactttgcatattcttcggcataaatggtgcaataccaactgtgaaagaaacggttgcagttcttggggtaccaaacaatggtccgattgtggcatggattaaaaccataaatactactgcaaatccggcacccagcggcttaccgatgtcgtatactccgtctgcatgagtaattgctactgctaatacagagaataatggtaataaaacccctgtgatcaaaaagccaactgcagctgttccccaatttgctccagctagttgtcctaaatgtaatggaaagattaggttaccagccccaaaaaataatccaaacagcaaggaagcaacaacgagataatttttccatgtaagttttttcgatgtatgatctgtcattttctctcctccaaaacatccctgataaacaaaaaaggccctcagctgcaaattgtaactgagggacgctttgagcgtggtaccaccctttatttatatcactattgctagcaatacctttcacgtacagtcaactacttgacgatacgtaggcactataatgggtgctcccactacttcttactttaagttaagaaatagaactcgaaagtgattttcatttaaacttaggatttatctcctcacacctaacgagactcgctgtaaattaagtctaaattactcttctttctctttgttttcagatttattaaatttgttaataactattttaatcaaaatataatcgttgtcaacaacttttttatttatttttcaaattttctattcaaattgagtctgccaattaggatcattatttgccgcaaaacacatggtaatttgttcctcagtatttcgcccaagtgaaagcttcggtaaattatctaatgcaaaataatcacaggcatcagtttcatcgttcggcttaaattcaccactaatttctttgcataagtaaaataccttcgtaatgttggtggccaaaattggtttattatgatgattacgatcttgaactgcaataattttgacgggtctaactactctacctgcttcttcatatgcctctttaacacaattttgtgctgtagtttggtcataatcattccagccgcctggcaatgaccattcctgagtcattttttcacggacaagcaaaattttattatccttaaaaattgctgctcgcgtatcaatcttaggtgtttgatagccctcatcacccaaaaagagtgttttaatttgttctttaggtagtcctgtcctagctgccatcatttcgcctgcaattttacggattttttcatagcgctcacgatcaaatacatcatgaccataatgcaaccctgcttgagctaaactttgtaaatctgtcgcccacttgataaattgatcatctgaattcatttttattgcctttaatataaaattctaagaaaaataacaaattccaagaaactgtcaaatcttttgtgtaaatagttctttctcgtaaattgattttttaattatttatttaatcaaagtaggattctaaggtgtcctgaacctgaccaaagcctttatgaattcgattgaaataacggtcattgtagctcattgcctgaataccaataaaagcatcaagcgactgttcagttggaaactctgccttaggcttagctttgcgcttgatcacattgttaaatgattcaatcatgttagtcgaataaattgaagctctgatctgcttgggatagttataaaagaccagcagatctggttctatgtctttcaagcttctgataacatggctgtaaaccttgccccatttggtatagaagtcatgcaggacagctgtggcttcttctttgtttgtctgttgatgcacctgtttgaattcgttcatgatcttttcacgatcgtcgacgcgtactttagcgcagatattgcgcatgacatgaaccaaacagcgttgaaaatgagctttaggataagtcctggccaaggctgttttcatgccaacaacaccatcagaaagaaagagttcaacttgcttcaagcctctggacttcatgttttgaagcatctctgtccagacttcaatgttctcactaggagcaatgcagtagtcaatgacttccttatgtccattaggtttaatgccaatggcaatatagactgcttcacgctcaaacgtttctcggcgcaaaggaaggtatgtcgcatccaaatagacgcagaaaaacttgtcgcttagcttgcgtttgtggtaagcctcaacctttggaatcatctgcttggaaatatttgatacctgagctggactgtaatggctgccatacatcttttcaattagatcggctatttccctggtggtcacgcccttggagtaaagcttgataatcatgctttccaagatatccgagtgctgcttgtagtcaggcagcgtgtgctgatgaaattgaccgttgcgatcccgaggcacttgcacttcaattgggccaaattgcgtatcaactttgcggaaataagcaccatttctagaattgccagtattccagccatttctggcatagggatcatagcctagaaaggcagtcaactcagcttctagcaagttattaacagcctgttgtagctctttgcgcaataaatcatttattttgtctggattgaatagagcttgagcaaaatctttggtaaaatcattcatgaaggagttcttctttctgtatgtgttttttttgttcaaaccaatcatacgagaaaggaactcctttttctaatgtttaaagaaataaatttaaggaattattcatccttacacaaactattttacagtctcaattccaaattaataggtaaattgaaatacctattttagattttatcacaacccataagtaacttactcctagtgcaaaaattagtagcaatgttaacagattacgaatactaaatcgacattcactcttgttatatacttgatttatagctaatgagaaataatataaggccattgaaaaaataatcaggaaaaacaaaaaagttttatttatgtcatgcacttgtaaatacagtattgctactgttgacaaaagtattgctactacaattgcaatatgactatacattaaaacaaagcctttacttatctgatgatggtcaattaatttatctgataaaactacatagcttgcaaacatcaatactaaagataaaaacaaaaaagcagcataaactaaaggtgtcttactattgaaataacttgtcaaattaacgatagcctcaccaaaggcaataattacgattaaacttactctctctaccaaatgagggaaatttactcgttcagttttaaacatcccttttaaaaacaatggcaaaataaaaccaacaatataaccacttatacaaaaataaattccaacagggtagccgatgattaatcctacaataattaagataaattctattcctaaaatgattaaaaaggcttgtttatcattattatctgcttttacaaatagatactgacaaaataaaattaagatcataacagccattgcaatattaaaatagtgaaaagtaacttgccattcagtattaatattgttagccagataaactgctacaaacatatttaaacctaaaccgccaatatctaaaaattgatttttgctatatcggttaaaatagataacttgataaagccaaatttgcattactacaattacaaccaataaaaattgaagaaaagtaactaaaggaatactgccattaacaggatgatgaatcattgcagtaattcgagaaattgcgtatacaaaaactaaatcatagaataattcaaacattcccacaggcttagcgattatttttttcatactattcgagactgtaaaatagtttgtgtaaggatgaatgattccttaaatttatttctttaaacattagaaaaaggagttcctttctcgtatgattggtttgaacaaaaaaaacacatacagaaagaagaactccttcatgaatgattttaccaaagattttgctcaagctctattcaatccagacaaaataaatgatttattgcgcaaagaactacaacaggctgttaataacttgctagaagctgaattgactgcctttctgggctatgatccctatgccagaaatggctggaatactggcaactctagaaatggtgcttatttccgcaaagttgatacgcaatttggcccaattgaagtgcaagtgcctcgggatcgcaacggtcaatttcatcagcacacgctgcctgactacaagcagcactcggatatcttggaaagcatgattatcaagctttactccaatggcgtgaccaccagggaaatagccgatctaattgaaaagatgtatggcagccattacagtccagctcaggtatcaaatatttccaagcagatgattccaaaggttgaggcttaccacaaacgcaagctaagcgacaagtttttctgcgtctatttggatgcgacataccttcctttgcgccgagaaacgtttgagcgtgaagcagtctatattgccattggcattaaacctaatggacataaggaagtcattgactactgcattgctcctagtgagaacattgaagtctggacagagatgcttcaaaacatgaagtccagaggcttgaagcaagttgaactctttctttctgatggtgttgttggcatgaaaacagccttggccaggacttatcctaaagctcattttcaacgctgtttggttcatgtcatgcgcaatatctgcgctaaagtacgcgtcgacgatcgtgaaaagatcatgaacgaattcaaacaggtgcatcaacagacaaacaaagaagaagccacagctgtcctgcatgacttctataccaaatggggcaaggtttacagccatgttatcagaagcttgaaagacatagaaccagatctgctggtcttttataactatcccaagcagatcagagcttcaatttattcgactaacatgattgaatcatttaacaatgtgatcaagcgcaaagctaagcctaaggcagagtttccaactgaacagtcgcttgatgcttttattggtattcaggcaatgagctacaatgaccgttatttcaatcgaattcataaaggctttggtcaggttcaggacaccttagaatcctactttgattaaataaataattaaaaaatcaatttacgagaaagaactatttacacaaaagatttgacagtttctactattccctcctaatatttgattgctgtttatcatactttatatttgtccaaaaagcaaaatatgatattaatttataagaatcagtttttagcttgattgtgaaaaattatgctaaagtaattattgattaataaattaatttaattggaggaatagccatgccacgaaatcccagaagacacaattttaatcaattctcagaccaagaaaaagataaattaaaaaatgtcaaaaaagaattagctgaggcccaaaagaaagagcctgaaagtctacaagcctttaacgatggagtgatggccattattattacaattattgttttagaaattcaacctgctctgcatgaaattcattatcagcaattcattagcaatattgctgtctttttaatcactttttttattgtggcagatttctggtatgatctacatttatctttttcatactatattttcaagccttcaaaagcgattgctattctagacttcttttttttagctgatttatcacttctgccagtcatgactaaatggattatggctgaaaattcttctttcgctgtagctaacttgggaattgtttttttaattgccaaaatcttagaatatctaattcaatattttggtgctaaaaatactgcgcgctattcccaaatcatgcggattattattagccgctcctttattagaaaaatgacggttactttatttttaaatgtaatattgatcattctgtcattattcaatgcaaaactagcaatgattctttatctaatagttccagttatttcatttctttttccagttaaacgcaacaaaattatgtgatttttatttaaaagagcgccagtaaacttaaactaaatctactggcgctcttttgttacttttcttgttccttacaatgactcttgcaaacacattctttactatttaccattttgcagtggcaaatgccatccttatctgcacaaggacaatttttctgacatttcatttcatcgtgacaaaattcatttttcatgtttatcatctctatattattatgcctatgataatcgaactttccaaccaatatatcttataattttacttttcctaataagattattttatagaaatatctagttaatttgttaatttaatctgctgatcagctaccgatgtaatgaagtaaggatcatgctcaattagtaacatcgttggcttcacactcttaagaagcttaattaattgatcttgattgaatacatctaaataatttgctggctcatcccataaatataaattagcaggttctgtcaatgacttagccaaagctactcgtttctgttgtcccatactcattttttcaattctagttgtaaaatcagcacgcgcaaatcccattttcttaagattgctcaacaaagcttcataagacaaatgatattttttagcaaagtcttttaatgatccgctatacattacaaattcttgtggtaaataagagattttcaaactttcaattagctcataattacctttggcaattagattttgagagatacccagtaaatgcttaattaatgttgactttccagaaccatttttaccttcaatagcaataatttcatgattattcaaagacaaagtcaagcttttaaatagttctctactattttttagttgcaagctaagatcattaagttgcaaaatctcacgatgataatctgcctgaaaattcatagtcagagtaggaactttttcaatattctttagcattccttctttttccgcaatcctcttatccatgcgattgcgtgcattaatcgacttcttcatcatctttgcagcttgatgtccgatcgctcccttatttaatctggttcgacgattgataatatgctgtgttttcatccctaatttcttacgtgcctctattttagctgcccaattatggaattgtaccttttcttggttcaattttttcacttgccctgtaagctttttatttttttcacgatcaaaatcatctcgcctttttttagttacctcataagtcgaataatttccttgatacaaatgaatcgctgtattttcaatcgctaatatatgatcagttacctgattcaaaaaatctcgatcatgactgactacaatatatccttgatcatgcccatttaaatattctgctacttgtttacgacttgtctcatctagatgattagttggttcatcaattagaggaaaagaatcttgatctgtaaatgataaagctagcaaaattttagtttgctcaccaccactcaaggtattgaaaggctgccataataaatcgggatctaaattcattagagttaactctcgttccagcttccattgttcaaaggcaacctgatcttgtaactcataaaaagtaatgtttttagaattttgaatttttacaggataatatgaaaagctagcattaccttgaatttgaccagttccacaatacttacctcgcagtaagtttaaaaaagtagttttacctcttccgtttcgaccaatcaaacctagtttccaatcagtatcaaggtctaggttaagatttttaaaaatatatctattgctgtcttcatattcaaaagataacctactaatcttaagattactcatccaaccacctcgcacaaaaagagcccatacttctagcaagcatagactctctccttacgaaaatgaattgtaataatcgaaggcctgggctttaatcctgctaaaagtacatagtctctccataatataaattactatttggactatgatgctaattacaagattaaaagcgcaacctaaacccttctttcattgaataatattatgctgtaataatagcacctgttttattcttttacaatagatatattaagtaactctatttattccataaaaacttaattaatgcttgatcaacttgagcattttcatgcagttttgaatgttgtgcatttttgccattaatcttttcaactttataagtactgtcaccatcaccaataatatttaggacttgaacatgctttttcatataaagctctcttacacctgtcatttgctgataagttgagtttatcttattaggctttccattaatattcaatcccattcataaattgcatctatataatttctaataaattgctcatactgcaccttaagttacagtatgagcaaagttaatcctttttttaatgtatttaattttacgaccgatgaatacatattattcactaattagtcctagacgctttcttactcttaatacatgacaaatcaatccaagaattaatcctgcaatcccaaaggtcagccacccaaagcctaaattgaaaaatgggaagtattgttgggcaaaaccaagcagtgtctgtaataatcgactttcatgtaacccagctggtaacgcatttaacatgtcaaagaatgctggaattaaggtaagctcagttgtaatccggtaaacgagccggtcattcttaaacagtggtgaaagtagccctaaaataattaaggtaattgctaacggatagaggaacatcagaattggcgttgaccatgcaataatctggttgagtcctaaattagcaaatagaaatgataatccacaattgattcgtaaaaatgttcgatacgaaattttaggaaaacggcgatggaaatcttgcgagaaggcaattactaatcccattgctgaagtcatacaagtgatagttgctaaagttgctaaaattgcatctccagcagttcctaagtaatggtgtgaaatctgagcaagagtaattccaccatttgctgctaatttaaattgatgcaaactagtcgcgcctagccaaattaaagctaaatagataattgcaactcccgcaattccgagaaaaccactcttagccgttgcaagtgaaatttgccgtgtcttcttaatacctaattctctaattgcagtaataatagtaattccaaaggctaatgctgccaagccatccatagtattgtaaccttgcaaaaagccattggaaaaagcatgccttgcatatgaagcagttatagcagcagtatttctagaacccaatggattaatgaatgctaataagaagataaggaataataataacaagaacaagggatttaaaactttaccgattaaagtagtgatctttccctcatgatttgaaaaaagataaactaaactaaagaaaattgctgagtagattaataatcccaaagtattagttgacttagataaataaggggcaattccaatttcataaggaacagtggctgtccggggagttgcaaatagtggtcccaaagtagcgtgaacaagaattaaaaagataagtgcatagtaacgaccattcggcaatgcaagatcatagatcccattcgacttggtaatactaattgccaacagcgccattaatggcagtaaaacaccagaaagcagaaagccactactcgctattagccaattactacctgctaattgacctaaatgaactggaaaaataagatttcccgctccaaacaacattccgaaaataagtgatgcgataatcattgaccgcctaatactcgcttttttggttttcattttaatattcctttcgataaaaattatattaatactaggtacaaaaaaacgtccttataagcataaagcttataaggacgctatcacgcgtgttaccaccttattttagaataatattactattattcccttaccccatacatagcaaaactagatacgttgacgctataacgggcgcgccctcctaaagttacaattactctcacttcaagcactcctaggctactttcactttacttttctatccccactcacactaatttgggttcgctgactagttaaggtaaagctaatttcctattcttagtggttattcataccatttatttagtaagtatattacataataaatttaataaagtcaatattattctaaactattttcccggatttaaaattgaagtgcaacactaagtgttaaacaaaaaggccatgaagacctaaacttgaagtgacgaaaaatcaagaaaggaagatctttatgaccaattcaaattctagcatttctaagcactatcatcaattaaccagcgtacaacgtggacaaattcaagcaatgctggattccggcataacttcccgtactgttatcgctcaagaagtcggctgccataagtcgacaatcagtcgcgaaatcaaacgcggaagtgtcctgcaaagagacagcagctatttattgtatgagcactattacgctgatactgcacagatttattatgagaagcgtcgcaaaaactgctatcagcgcaatccattgaagcattatgctgtctttttgagaatgctctccagacgctttaaagctaaatttgatgccaccagcatcgatgaattcgttggtgaattcaaaaggactatgccaggctacccttgtcccagcacaccaactgtctatcgctatattgatcagggcttgctggacataagcaatattgatctgcctatgaagctcaaaagacgcaggaacaagcgtcatcacggccagagcggtcatgctttgcacaagaagcatcttggcaattccattgaacagcgtcctaaagagattgaagacagaaaaacgccgctgcactgggaaggagatctggttaaaggcgtcagacgcaagaatcagcctgctttaatgactttgaccgaaagaaccacacgctttgaagtagttatcaagattcctgactatcgggcaagcacatgccaaaggctgcttcaaaatgagattgacagacatcctgcctggtttaaatcgatcacgtttgacaatggctctgagtttgcggatatgaccgagatcaaaggctgccagatctacttcgcccacccatattctccatgggaaagaggcaccaatgagaactgcaatggacttctgcgtcaattcttccctaaaggcaaaagcatgaaagataagtcagctgcttatgttcaacaggcaactgatgccattaaccgcaaacatcgtcgaatccttcaatatcacacagcagaaaaactcttcaagcaatatatttcctcatagcctaactgttgcacttaatttgacaattcaggttctaaactatttttaattttatacttttcgttttgacatcaattggtttcgaatgtatctgcgaaatgcttcatcaccaagtttttgacgcttttcatataattctttggtaatcttaccagtaacataacacatccgatcacgatccttatcagtgacagccttaaagatatcttgagccacttcctcaggcgattctaaactatctgtgtctggcattaacatttttgtttgattttttagtaactgatcaaatcccggcattgcgaatgtctccatcttaaaaccggttttcacaacccctggaacaatgattttcacctgaatgccaaatggcgctaactcatgataaagcatttcacatactccagtcaccgcccacttatctgctgcataaataccatctagagctaatcccatttctccagcaagggaagtagtagtcaaaattaacccacttttcttttttttgaaatatgggataaatttttgggtgacacggatcattcccagcaggttcgtgtttaaggactgctgcatggcttcttcggtcatgtcctcaaagcgagacttcatcccataaccagcattattgaacaaaacatccacctcatgctttttaagaacttccgagactgtctgagaaatttgttcaggcttcgttacatcaagtggataaataaaaacattttgataggatgttaattcggtctctttttcaggtgaacgcatagtagcaatcaccgttcaccctttttctgcaaataattttgctgttgctttgccaattccggatgacgaaccaacgataaaaattgtactcatattcactacactccttatcttaagatggacgattaaattattcactgacgataattaatgacttgattgcttcacgtttatccatcacttcatatgcctgttgaattttgtcaagactaaaacgcttagtaaagacttttcctggatgaattttaccttttaatacagcatcaagaagaatcgcacgatcataagtagtgacggaagcaattcctccgcgaagaccaatgttcttccagaaaagcgtgtttgatgatggttcggtttgtggaacacctactcgaccaacaattgcgcctggacgagctaacttgccagcttgttcaatagcagatacggccccaacacattcaagaaccttcttaactgcatcatcaccacgtaatttagcaccgattacaccacaaaggccaacagcaccatccccgataactgcgaccgtatcgtcttccttggcttcagcacttgcagccgcatggtaaccagttgccatcacatcagctaaagttaaaagatcgtttaattgctcgtccgtgtaatctgaggggtgacctggaatctttactaatgcccagttagcattagtaaaacgaagatattcaccttggtaaccaccattactgccagcttcttggttaacacagttgccatcgaaaccagctaaacaagctacgcagtgaccacaaccatgagtaaatggtgcaattacaaaatcaccaggcttaatatctttaacgttatcgccaacttcttcaacaattgcaattgcttcgtgtccaactaatgatcctttttcacgattagtaatcccacgataccaccataagtcggacccacatacacaagcacgaacaatctttaaaatcgcatctgttggcttttggattattggcttttcaacctcatgaacttccatcttaccagattccataaatacagctgctttcatctaaattcgctcctctaattatttttacattgtattaactcaaactgtaaaccttaaagtccactacaaggcaagtaaaaatttaactcggcttattaatgccaatactttcgcaggaataaagctcatcatcgttaagtaattttgtaaccaaatcaacgattgattttattgaaacatcgggaccaccaaatggttcgcccttatgagtaatttcataattaactggaccaccagtaaaccagccgggacgaataacggtatagtttaaattagacgcttccacgatgtcagcagcgtcccgatatgattgaagaattgggttgctttccaaattactactaataccaattgaagcaggaatctcattataaattcccatcgaactaataaatatcaatcgtgatatgttattacggtccatcgccgcaacaatctgcttagcataggcaactaagtcaccgcttaatgctgcaaacaccgcatcctgtcctaccaacgctttgtctaaatcgtgatcatttaatacatccccactgattacagtttctcgttgaggatcaataacattaattcgattggctgaccgcgcaaataatgttaagtgattgtccgtttcatttaatactgtttgagtggttgtagtccccaatgctcctgttgctccaataattaaaatattcttcataacatttgacctcctttaataagtgctggcgatctgcttagtgatcgcccatttaccgttaatcttcgcaaattccatcttcatttgaagcaacaatgtacttactgggcttccccaaacgctagctttaactttattgtgaccaattaagctagcgtgattcccagcaatctgaatgtctgagatctgctcctcatcagaagaataatacttaagctcaccattttggatttgatcgatccattctagtttgggctgagcatacccagtcatgtggtgtaataccatggttgaatctaaaatctgacccaaggtttcaatgtctttatctacgattgcccgattttcctggcggtaaaggtcaataattacctctttatctgtcatcaaatcgtcctttgctaataactgttccatcaaagccttatcaaaaccagtttttctctttttgctttgattaattgtctatatcataacgatcttcaataactaaaccaattcacatttacaattaataatcataagtaaaacttatcaagctaaattcttatatacaaaaaaacgccaaaaattagtgaagaagcttctttttgacgtttatttttacctcatagtctatttcttaaaattgtttctttaatagctcagcaaacttttcaatgtaaaagcctgaattatcttgtttccaatatgtatagtaattttgttgaaggggaatatcaccggcataaagcggaattgtcttaacagtttctttattaatcatcgcttgagttcgtttattaacaataaagtacccctgattggctgctaccattatttgagcctcatcgatagtagtaaccgttaaaaaccggctttttattcctaaagcatcccgataatattgttcctcagccgctttttgtgtttcattaacaattaaaatgcatgataagtcagctaattgcgttgctaaaatacggttattatctggatagttcaatggtaaaactaccataaaatcagtttcagttaagaattcattgtggtattcgtttgataaagcacgccgctgatcggagaaagccagatcaattcgatcatgttttaataactcaaataactgttcatgagttccgcttttgattttaacctcgacttctggatacatttgcgaaaaatgggcaacagtatgcaaaaattcgttagtaccaaaattcgataaatagcctaaacgtaattcataattgattggtaatttaccaattttttgtgtctgatcaattaattcattagttgttttaacaacttctttggcgtgttggtagaagaattcaccagctgccgtcagttcaaaacttcttccctttcggtcaaacaatttaacatcaagcatattttcaagctccttgatttgctgggaaatggctgactgggaaatattattttcttcggcggcgcgggtaaaattatgtcgatcaaccaccgcaataaaatacttcatctgttgaaacatttacttatcctctcaatttgatttggaattactaaacaaagcaacgatgctcaatatactttgacccttcacgaattgacaacggtgccaactcttgctgattttactcaataaaatcacgaaccatgatttcgcatatatttttcatttgtctagcacattcagggttagcattgtgagcaaaccgttctttcaattgtctataatcaagcatctattcggctccacagcttttttactactatcttatcagatgtttattctcatcaagcatttcttttttctttaattcataatattcttcttcatctaaaaatgacatcacatggttttcaaagtggtcaaacttgtaggctagataattccaagttcattccgttttgcaagtaggataaagcctgtttaacgagaaccaattactaatattgaaaatatttaattttttgcttgactataaatgaatgatcgtttattatacaaatatgcgatacaaagatgaacacaaaaaagaagctatttatgaagcaacaattctacttctaaataaagaaggtttttcatcaacatcaatgtcgaaaattgctaaacatgccggtgtttcagcttcaacaatttatatttattttaagaataaagatgatatgttgaaaaaattgtatttagatactaagaaaaaaatgagcgccaaaatgtttactgatacaacaaatgatgatgctaagtctagcctagctaaggttattcgtaactatattgattttattttagataatcaggatgcttttctctttttgcaacaattcactaactcgccttatatgactgaattagatgagcgcgaagcaagcacctattttactccaatgtatcaattagttaaaaaaggccaagaggagggaacttttaaagatgtagacgctaatttattatttgcctacattgagccaccaattaccgaattagctaagcgtcatttcaaaggagaaatagattttactgaagaaagaattgatgtattaattaacttagcttggagtgctattaaaaagtagcactttaatttttattattacagtgaacgatcattcgtttattataataaaatcaagtgtttacttaatcgtaaccaaaataagcaacaataaatgaacggagactacaactatgcaaaagaaagtaacttttaaaaacaacgaacacgacatgtctggtatcttattctttccagataattttgatgaaaacaagcaataccctgctttctcaatcgcatctcccgctggtgcagttaaggaacaaattgcaactaattatgactcacggttagcaaagtatggctttattgccctagcatttgatacttcacatcaaggtgaaagcggtggcaaccctcgtcaattagaagctccttatgaacgtgtggaagacataaaatgcgctatcgattatttaacaactttgccatacattgacaataatcgtttaggtcagttaggtatttgtgctggcggtggctactcaatgcatacagctatgaccgaccgaagaattaaagctgttgtagctgtaagtatgagcgatccagcatcatggattcgtgacggttttgacggaaaaacctcagttgaaactcaattagccttacttgaagaagcttctaatcaaagaactcgtgaagctaatggtgctgagccaatttatggaactttcgttccagaagaagtaactgaagggatgcctaatactttagtagaagctcatgaatattatcgtaccccacgtgttcaacatcctcgttcaactaacaaggtatcaatgatgtcaattgataaaatgactgacttctccactttcttgtttgctgatcgctactcaactcaaccaattttgatgattgcgggtagcaacgctgacactttccgtttctcagaagatctgctcaaaaaagcagcttcaactaacaaagaactattcactattgaaggtgctactcacggtgatctatatgataaacccgaatacgttgatcaagcagttgaaaaagctgccgctttcttcaaagaaaatctttaaacatattaatgtgaagcgacttaaaatgaataaacaaatagtctacttttcaaacagtggcaataatgagcgtttagctaaaagaattgctcattattatggggttaatgcaacacctattattccagttaatccgtatcctaataaatatcatgagttaacttcacaggcaaaaatagaacgttttcggcacattaatgttgctattaaaccagttaaacttgaatcaaatatcaatactctaatcttagtatcaccaatttggtatgcagatttgccacgccccgtggtcacttttctgaaacaggttcagagatcttttcaacatgttgtttttgtcagtgacaagttcatgataggttttggtatttgcaagcgaacattaaaaaaatatttatcaaagcaaacaactattgatttaatagcagccaacagtaataacttttcattagttaaacaatactttcaaaaataaaaaaaactcttaaagattgacgtgtagagttctgtcttctttaagaggctttttttgtgtttgcttcacgataaatactttgaataaggctttctagtaaatcattgccaaatatacaactatccaattatttttttacctgaattgtcaaattaagtgcaacagttaggctatgaggaaatatattgcttgaagagttcttctgctgtgtgatattggaggattcggcgatatttgtggttaatggcatcagttgcctgttgaacataagcttttgacttgtctttcatgctcttgcccttagggaagaattgacgcaaaagaccattgcagttttcattggtgcccctttcccatggagaatatgggtgagcaaagtaaatctggcagcccttgatcttggtcatatccgcaaactcagagccattgtcaaacgtgattgatttaaaccaggcaggatgtctgtcaatctccttttgaagcagcctttggcatgtgcttgcccgatagtcaggaatcttgataactacttcaaagcgtgtggttctttcagtcaaagtcattaaagcaggctgattcttgcgtctgacgcctttaaccagatctccttcccagtgcagcggagcttttctgtcttcaatctctttaggacgctgttcaatggaattgccaagatgcttcttgtgcaaagcgtgaccgccatggctgtgatgacgcttgttcctgcgtcttttgagcttcataggcagatcaatattgcttatgtccagcaagccctgatcaatatagcgatagacagttggtgtgctgggacaagggtagcctggcatagtccttttgaattcaccaacgaactcatcgatgctggtggcatcaaatttagctttaaagcgtctggagagcattctcaaaaagacagcataatgcttcaatggattgcgctgatagcagtttttgcgacgcttctcataataaatctgtgcagtatcagcgtaatagtgctcatacaataaatagctgctgtctctttgcaggacacttccgcgtttgatttcgcgactgattgtcgacttatggcagccgacttcttgagcgataacagtacgggaagttatgccggaatccagcattgcttgaatttgtccacgttgtacgctggttaattgatgatagtgcttagaaatgctagaatttgaattggtcataaagatcttcctttcttgatttttcgtcacttcaagtttaggtcttcatggcctttttgtttaacacttagtgttgcacttcaattttaaatccgggaattatttttttagttaaatttgatgtaatatcagacaataaagaaatttttcctactccacgcatcccgtaaataatcgatatttgataacatcttcaaatgattcaactacattttcgactactttgtttctccctaaatatatttggggaactttaccaaagttagtatcaaatagatttttggcttctatagtttttcctccattttaaatttcttcagattttttgattttattttagatctaattacataataaaaagtaagctattacacttgctaaaatgaaatctaaactatttattacattgcttctcctattatgaaatgcttttaatgtctaattttgcttttttccatatcccagcaggtccaagccagcaataaaataatcagtacaataatagcataagcgaaaatcttggcatcttgcttaggcattatattaaatgaaacaaaggttgccggcaaattatataagttcaagaaaattaaaataatcgagctgatccagcctaagaccgaccagcttctcctatttttgaattgccccatcattcttttatcatcagtcataattaataatggaacaatcgaaaatgggacagcaaaagctaagaagacttgtgaattttctaaaagcatgttgagagcaaagtgctgctgagaaattgtgtcgttagctgtcataacaacgcaaatgataactggaattacggataatagccgagtaaataatcgtctcgcccaaagtggcatcttcaagtgaatgaagccttccattacaatctgaccagttaaagtccctgtaatagtagaattttgtcctgaagcaagaagtgctatggcaaagagaactgataaaattccagttttagctactgaaatcaaaattggattacttagcattgcagtattgcttaaagcatcataaagtccaaaaaatgaactatctttaaccgctccacttttaaaaacagctgctcccataattagcaaaagcacgttaacaaagaatgctagaataagttgaatatttgaatcccaagtagtaaaacgaactgcatttttgacatcatctggatcatgatgatttatctttcttgtttggcaaattgaagaatgcaaataaaagttatgcggcatcacagtggcaccaataatacctaaactacctgttaacggggaaagcccattaaccacgggatgttgtgcaactagttcgggactcggaaaaacagacaagaagatcttactccaattgggctctgctaacatgacttgataggcaaaaacaaataaaatcaccataatcaaacatgaaatcaaagcctctatttttctgaaaccaacctttgacaataataatagtagaaacacatcaaaaatagtgataaatgttgctataactagtggaattttaaataaaaggtttaaggcaatagctgcaccaataacttccgccacatctgttgccataattgctaattcaattacaatccaaagaataaagctcaatctcttactagttctagcacgaattgcctgcgctaaatccatttgcgtaacaattcctaatttagccgacatatattgcaacagcatggccattaaactggaaattaaaatagtagaaatcagtaaaaagttaaagctctgtccaccattgattgaagcagcccaattgcctgggtccatataacctacagcaactaatgcgccaggtcccgtataagcaaaaagcattctaaagaaattcttagttttaggaaccgcaatcgtactattaatctcagctagcgatttaccattagcatatgaaataaaactatgattttccatcaatggtgctcctatccatggattcctagtgtcattcgagcaatacgcgacatcatatttggattccattgcggataccagaccagtttaatttgacaatcatcgatttccgcaacgctctctgctgccttggtaatttcgttattcagccattcactcaaaggacatcccataatagttagtgtcatcgtaatctggcaaagatgatcatttacctcaatgccataaatcaagcctaagtcaacaatatcaacttgcaattctggatcaattacatcttttaatgcctggtaaacatctttttcttgatcagataaattttctatttctaacattaaccaattgctccttccatttggaagctgatcaatcgattaagctcaacagcgtattccattggcagctgcttggtgaacggttcaacaaatcccataataatcatttcagtggcttttctttctgaaataccgcgactttccaaataatacaattgatcttcagaaattttagaaactgttgcctcatgttccatcgccacatttgagttttcaatcgcattagttgggatggtatctgaagatgattgatcatccataataatcgtgtcacattcaacatgcgccttagaaccgtccgactttttagaaaacttaacacttcctcgataatcagttgagccaccgcctttggcaattgacttagaaacaattgagctagaagtgttaggggcattatgaaacatccctgctccagaatcttgatgaatcccgtggtgtgccactgcaatcgaaagcatggtaccacgtgctccttcaccatttagataaacgctcggatatttcatggtcaccttggcacctaaatttccgtcaacccattccatcgtagcatgcttgccagcaacggctcttttagtttccaaactataaacattatcagaccagttttggatagttgtataacggcaatatgcattgtccaacacatttacttcaaccacagccgcatgaagagagtcagatgaatattgtggtgcagtacatccctcaacataatcaaggtgtgcatcttgatcaacgataatcaaagttctttcgaattgaccagaattttccgcatttaatctaaagtaagcttgaacaggtgcagggacttgaactcccttaggtacataaataaaagtgccacctgaccaaacagcacagtttaaggcagaaaacttatttaaatcaattggaactaatttgccaaaatatttttttaataaatctggatattcctgcaatgcagtatcagtatctgtaaagataatccctaatttatcaaattgctctttcatcttgtgataaaccatctcagattcatactgggcagctgaaccagctaaatattttctttctgcttgtggtacacctaagcgttcaaaagtatccttaatatcctgtggtacatcattccaatcacgatattttttatcagtcattttttgataataaagcatatcatctaagtctaaacccgaaagatcaggaccaaaactaggcattggcattttttcataaatatggaaggcctttaatcgataatctaacatccacttgggctcatgcttttcagccgaaatttgtctaattacatcttctgttaaaccatgtcccgttgaaaattttggttttacattatcatgaaagccgaattgataatcttcatctttaactatttcttctgctttagtcattatcctcatcctcgttttctttaccaagtaatgctcgatctaatccccaccaagccaaggtggcacatttaatccgcgccgggaattccataatacttatcaagacttgagcgtcttctagtttttgcatgtcttgttcactacgttttttgccagctgctaagtctgaaaatatcctagaaaaactaatagcctgttcaatattttttccttttaccaattgggtcatcatactagctgaagccttactaatagtgcatccttccccatcaaaagcaatatctttaatttgatcattctcaaccaaaatagttaagtgaatcttatcaccacaagttggattataaacagtcgtttcattagtataattagcaagttgtccaaaattgcgtggagtttgagcatgatcgagaataactgctttatacaaactttttaatttatctaagctcaccgaaaaactcctttgcttcttgaattgaactaaccaattgatcaatatcattttttgtattatagattgagaaactagcacgtacagttgattctgtcttaaggctttccatcaatggttgtgcgcaatgatgccctgctctaacttctacaccatttaaatcaagtgctgttgctaaatcatgtggatgaatttttcttaaattaaaagaaatcacaccagtacgattactgcagtcttttggaccatacaccactaagtcatctatttttgataattcttttaaagcatatgctgttaaactatcctcatgtttttgaattaaagttaaatctaactttcctaaataatctattgcggcacctacgccgatcacgccagaaatattcggagttcctgcttcaaacttttgaggcacaggtgcccaggtagctccttttctagttacatttgtaatcatttcaccaccaaaacgataaggcggcatttgttctaacagagcttttttgccataaagcacacctactccagttggcgcaaacattttatgtcctgaaaatgcataaaagtcagcatctaaatcagtcacattaaccggaaagtgtccgacggcttgagcgccatctactacaacaatcgcgccatttttatgagctaagcttgttaaagccgcaataggattaattgtccccaaaacattgcttacatgagtaatcgctacaattttagtttttgtagtaattttactttttgcatcttccagatctaaacgaccattagcatcaatttcaataaactttaacttagcgttctttcttaaagcaatctgctgccaaggcaaaaaattgctatgatgttccataattgaaacaacaatttcatccccagcttggatattttgctcaccataagttgccgcaactaagttcaaactatctgtgcaaccactagtaaatacaatttcacttgcatttttggcaccaataaagtcagctactttttgacgggcattttcatatttttgtgtagcccttagccctaaagtatgaacaccgcggtgaacattagcgcgatcaaaattagtaaaatgttcaatctgtttttctacaactaacggcatttgactagttgctgcattatcaagatagatcaatttttcatcattaattttttgattaagaattggaaaatctgctttaattttcttaacgtctagtttgtccatcaattaattttttttccaaaatatcaatcatcttttgccgaacttccttattaggaattgcatcaagaacagcccctaagaacccgcgaattaccaatctttgagcttgatcatatggaataccacgactcattaaataattcatttgaatttgatcaacaggacccacactagccgcatgagcagcaataacatcattttcatcaattaaaagcagtgggttggcatctccatgtgcattatcagacatcattaaaactctattttgttgatcagccttagagccatgtgcaccatgaacaatctgaccaattccattaaaaattagttgagaattttcaagtaaaacaccacgttgatttatcaaaccagttgaatgtggcccgcggttggttactcggttgttaataccgactctttgatcaccagttgtaactgcaattgccttagaatccgcataactgccttcgccaattaattctgaatccaaatcgcctaaggtgttgcagtcattcataaaagcaattgcccattcaacatgtgcatcattttcaattcttgcacggcgattaaagtaaagcgttgtatccttatccatttcatcaagggatgaaaattcaacatgactacctggatgtgcaacgatttccaccattaagtttgcggatttaactgctttatcctcattttgaatttcttccaagaatttcacttgactgttatcctccgtaacaatcaataaatgtgaaatatatggatcttgcgtagggttcaaagtaactgtaattggttcggctaaaactgtatttttaggaatataaagaaataagcctgaatttaaatacgcataatgataagccgttaatttatcttcatcatttttaataacggaagctaatgcggatttaactaaatctggatattgctttattgctgtaaaaagatcgcataagatgattcccttatcgttaagaagatcatgattctctttttttataaaaaagtcaggttggttttgccacttaaaatcttctttagcaatcaacggccaatcttgataggaaaaacgctgcattttgggataagaaagtttatgcatcttttcaaaagaactagtccttaaatcagttaaccaggaaggctcgttgttttcctttgatgagacaagtatgttttctttgctcaacatttgacgttttcccccccctaattttcatcaactaacttaatatgtaacccaagttcatcgcgaagacctgcatatccttctttttcaagttttttagctaaatctggtccaccgtctttaacaatacgtccatccatcatgacatgaaccacgtcaggcacaatataatcaagcaaacgctggtagtgtgtaatcattaaagcaccaaagttgtcaccgcgcatggcattaactccccgtgatacaactcttaaggcatcaatatctagacctgagtcgatttcatcaagaatgccaaaacttggtttaatcattaacatctgcaaaatttcgttacgtttcttttcaccgccagaaaagccctcattcagataacgctcggtcatggcttccttcatatctagcaaatccagatttttatctaattcattcaaaaaagtcatcactgaaatcggatcatcttttggtcggcgagcattaattgctacccgcaaaaattcagcattagtcacgccaggaacttctgctggatactgcatagctaaaaataatccttttctagcgcgttcatcaactggcatgttaataatgctttcaccgtttagcaaaatatcgccttgcgttatgtgatagcgaggattccccatgatagtctcagataaagttgattttcctgttccattaggtcccataattgcatgaatttcacctgtcttgagagttaggttcacgcctttaagaatctttttactcgtttttttatctttgtcttcaacttctacatgtaaatccttgatctctaaagttgccatttaaatcctctttttctacatttggtattgctgcttaactatcaaatacaacatatagataatataacgcaaaaaaaattttattttcagtcttgacttttaacctaacatgtttgcgtagtcatgaactggcacttgaagtgttaaatcagaaattggaaatgtaacacaagtgttgacatagttgtattcactatcggctgcacgacgtccaggaaatggaataaatacttttccattaactactcttgaacgacatgcaccacaaacgcctgagcgacatgatgaaggggcaataatacctgctctttccattgccaccagcaaactttcatcacttcttgctggaataacttgtatttgatcacgggttttaactgtcatgttgaaagtcttattctttgcttcctcaggataattcttgaaaaagtatggatttactgaaccggacatttcttgtcttacttgccctggacgaagatctaactttttaatttcttgatttacaaaatgaatcatcgcagctggaccactcatataaatagaataattcttatctgctggagcatatttttcaatgatggcctgattgataaagccatgttcatatccttctcgtattatataaattaaatcgtattatataaattaaatcagtgataatgattattcttttagtttgtttattcgatcatcagatgctagtctctaattgtcattgaccttggtcaattggtataggttgtttccttctgtagctttgactacttttttagtctgccgcccaagcagttttactaatgacttactcacatgctgtatcgattctggctattactgattcagagcagattcagtcgcagctttttagcttgaacctatgaatacttatattttgcgagattgtcttagaatctgtaattagggactaacatgtgatgatcgatctatgaccaaatatttgctagaaaggaggccattctcaatgaaactttttatcggaattgacgttagttcaaaagatcttcaagtcgctattactgactcagaaaattatcaaaaacctttacttaaccaatctttttctaatgacctgattggtgctaatgaggtcaaaaagataattcttcaacttgctaaacagaacagctatgacaaagtaattatcggcatggaagccacttcaatctatagctttcaccctgcttatttctttgccaatgacgaagatttacaaaaaattaatcttgaaactgatgtcattaatcctaaaaacactaaacgatttcatgacgtttacgaagaaaataagaatgatcctactgatgcctattacatcgctgaatacttacgctttggtaaataccatgtcactattgctcggcaagaggaatacttagctttacagcgtttaactagagctagatatgaaatcacatcttcgctcactagagctaagcagcacttcattgaaactctttattatcgtgtaaacaaactagttaccgttgacaaagacaatattaaaacttctatctttggcgcaacgatgctgtcaattgttactgatagtaaaaccatcgatgaaatcgctgaaatgccaatcgaggatctaattgactaccttcaaaccaaaggacgtggccgcttctctgatccagagactttagctaaagcgatcagaaaagccgttagaggatcatatcgcttaggtaaagtcatgaaagactcgattgatgccgtattatctgtttactatgccgaaattaaaactaatcagaaattgattaagaacttagataaagcaattacagatatcgtccaaacgcttcctgaagagagaatactacaatctattccaggaattgggtcagtttattccgctggtattatcgctgaaatcggcagtattgatcgctttgacactgaagcacagctagctaaatacgctggtctagcttggcgtcaaaagcaatctagtaattttgatagcgaacacaaaccgatgactaaaaacggaaatcattatctaagatattatttggttgaagctgccaacctgattaaacaaagagatcccgtttttcggaagtactatcaaaagaaatacgatgaagctttctattctccgcataaacgcgcttgcgttctttgtgcaagaaaattaaccaggaccattttcactctgctcaaaaatggtcaaatctatcaaacaccgaggtgattaattggtctaaaacatttttggaggagtaaataatagttgttaaaaaatcccttgaaatagggcttagtttcatgcacgcaaattttggttttaaaacaaactaattaaaaataaaatttaacttttacattgacttattaccacatgactacttcttcatcacttaatatgttaacgaccttgaccttatcagttttggcagcaattctatctaattcatcacccaacaaaatatggttgtgcgttctacttccatataaaataatcaaatttgcatcaattgtgccatcagcaattgcaccagccattgagtaaaatggtgtaataccgctgccaccagcaataatggtcttcttgtctcttaatggttcatagaataattgaccagcaggacccgaagcagctacttcagtgccaaccttccaattctcccaaatataaggagttacatacccatttttgactaacttaattgtgagcatatattcgccagaaagcgcctgcttaggtgtgcttgaaatggcataagcacgtgtacaataacttttaccaatatgaagttttaaagaaatatattgacctgcttggaaatatgcaagtttgctggtaccttttgattcatctggtacaaatacaaagctcttagcatcgtcacggtcaataatcttagtgattttcaaatattgcgtttcaggatgaagctcctcttcaagaatgttcatcggatattttttaggcaactctgcatccgaagcattttgaatttcatgttttcgctcattttgaagcttctttaaatcaataattcccttaatctcttcaaatttattcatgatctgctcccatattattaatatcactaacagctatttttgctgcagttaaaccagtagtgtatgaaacattgtaaccatcacacataaatccatgaccaccgcagaaatataaatgtggcagtggatttacaacgttctttaaatccattgatctaccaataatttgatcccatggtgcacaatgatagccataaatttcaccatcaggtgttcccatatagcgagcaaatgttggtggtgcagcaattgcaatctcttctatagaatcactaattttaatacctgttgcctgttcatactcatcaatagcatttttagctattttaactttaagtttttcataatctttgggtttaacattatcccaaacaccatcatcaactaatttagtaatgtagcaaacactagtttccttaggagaagcatttggaatgacagtatttaagcaattcatgatcataaaatcatttttatccatagttttacaattttcatattgttttctagtatcacctgttgaagcaatgaacacactatagtcatttattccaagttctcgacaggatttatttagcccaagatacaccaaaaaggcactggttcctaatttatgtgagtttgcatattttaaagcatactcaggaatacacttttgatccatcatgttgccataaactgcgtgaggagtaattccacaaataacttccttagcaaaaactttttcacctttaatttgcacaccaacagcttgaccattttcaactaagattttttctacagttgtactcagccaaacatcaccaccattatcataaattacttgtgccaatgctgttgacatatcatgacttcttctttgaggaatataggcatcgttttctacataagtagctaacatagtggcaaaatacggaaattcaaattcatcagtgggaatatcaatgtaacaccaatatgctccaagaatttgttgagcttttttaggaagttttaatttgttaagcacatcatcccaactcttagtagcatactcgataaaagctggatatttttttataacttcttttttatcctttccatctgctatttctgctaacgcattcatactttgctcacacagatcaaaaagcttttccatcttttctgaagtacctggtacatatttttccatcgcattaataaaattttctctaccagctggcatcttaacatcaaatccgtctttaccataaataatatagcgataagtatctggtaattcttgcatttttacgttggcacctaaccagtcatacatttttcgtactgcacgcggattatcagcatgaccatattcacataattcatgcaaggctacttcaaactcaaatctgccgcgaataaaactggttgctgctccaccagccagattatgtctttcaatcaatagagtttttttgcccattctagcagaacttgcggcggccattaagccgccattgccagccccaactacgataacatcatatttttcagccattttttaaccctttcgttttcaaatgattacgttttcattataattaatatgaattaaaaaaaggatcaaagtaaagaaaaacaaagttattttatataaactagccgttggcttctggtcctaccagtgcaaaggagaataatatgaaatttcacccaataaatgtacccactgcaacagatttattcttcgttaatcaattaaaaacagcaatcttaacaggaaagtttaacctcggcgataaattacccagtgaaagagttttacaagaacaacttcaagtaagtcgaactgtgatcaattccggattaaaaaaattagcggcattacattttatagaaattcgtcctagatatggggcttttgtagcagattatcgtgtcgatggcgatttgcaaacaatgaacgaaattattaatttctacgggggacattaccgaatttcacttttaaattcgatttttgaaatcaggaaactaattgaaaatgatgttgttcgcttagattgtatagaacaggatgaacaatgcctgcaatcagctatttcaaatatgcaaaatcttgccaaagccaccaattccaaggacgctgcacaagaaatatttgcttatgtacatagtttagccttggcctccaagaattatgtttatcctttgcttatcaataactttaaatcaatctatttaactttaggtgaatggatctgtaatgaagtcgatgttaattctatttctgaagagaatctaaaattaattaaattaatcaaatcaggagataaaaatatagcaattgcttataataacaaactgattaattggagttacgagattttaactaagcaataaaaaaacggtcgatttgcttttcgaccatttttacgcacgttttgcgcgcgattatttatttaaaacatattttgtagatctaccctcaccaattctctcaacataaccttgctttgttagttgtttaagtagatttaaaacttttgttttaccaaaattacttgctcgactaatttgtgtagaagtatttgcaccctcgcgaatggttctaaatactttcttttcatcatcgcttaaatcatcagtaataaattttagaattggtaaaattatttttattgaattttcaaagatctcgaactgtggttgaactaaacttccttgataggaatctttaattctctttattcctgtaccaaattgttcaattaaacccaatctaaaaaagacattagccacaataggatttcttaaaatagaaatttgacctgacagatactcatctttactcaagttatgaggtaatcctcctggagaaactacttctattcgattatcaaacatagaaactttaatttgagcattaatattccaagtcctatgaaccaaggcattagctattgcttcacgaaaagcttcttcaggaatttgacttataacgttacgagtaacaccatgtatttcctcacgctgataatactgccgatatttttgaatagtttggtcatactctttaagaattgattcattctcatagtttgccctatccagcataatattaatattttcaccaaagcgaacgacatcaatcccacgataatgatttttatctgctaataattcacccgcattagtatatccggcattcttctgttctagattaagagtaattagcacatcggatgtcaatttattaattcctagtttttcttttagtgccatttctaaaatattaaacgatagattttgatttgcagctgttaaactgtcataagtcttattttcgccaatcaaaattagttgtgataattctgttctatccacttcaattgaagcactatcatttcttttataagcttttgctttatataaatatggtggattatcgccctgttttaccgtcaacgtgactacattagttttatcatcaatctctaaattataatctggatgtggctggatggaatcatttattttattctctacatttaaacaaaaatcaattggattttttacaccaataattgttccatcatcctttataccaaatttaacttctcctgtaccataatttgcatacgcactaaccgtttttaaaaatgtgtttgtaagattctctttaaattctaaattctttgtttctctcacttaagtcaccttgccaatctattttatctacaattatactctttcgcacgcaaaaaaacggtcgattttattttcgaccgtttttacgcacgctttgcgcgattatttatttttcgttcacgataatcaatgacttaattgcttcacgattgctcattgcttcgtatgcttcttggatatgatctaaatcaaaactcttagtaaatacttttcctgggttaatttttccatcaagaacagcttgtaaaagaacttctttatcaggcttagttactgaagcaataccaccgcgaagaccgacatttttccagaataattggtttgacttaggctctgcatgtggtacacctactctaccgattaccgcacctggacgagcaatttgaccagcttgttcaattgcactttcagcacctacacactctaagaatgcatcagcaccagcattttccttagttaaagccagtacatctttaactgcttgatcatcacgacttgaaacaatgtcagttgcaccaaattcttttcctaattgtgcacgatcatcgtggtgggataaaagaatgattttttcagcgcccaacaacttagcaccaataacaccggcaagaccaacggcaccatcaccgataactgcaacagtatcgcccttcttaacttcagcgtttaatgctgcgtggtaaccagttgccgtaacatctgacaatgtttgaagggatgccaattgatcatcagtataatctcctggcttaccgggaatcttaactaatccagagtttgctggttcatatttcataaattcggcttgatagccaccgttagtacccggcttcaaattcaagcaattgccttcaaaaccattaatacatgcaacacaatgaccatatccatgagtaagagactgtaaaatagtttgtgtaaggatgaataattccttaaatttatttcttaaaacattagaaaaaggagttcctttctcgtatgattggtttgaacaaaaaaacacatacagaaagaagaactccttcatgaatgattttacaaaaaatatagcacaagctctattcaatcaagacaaaataaacgatttattgcgcaaagagctacaacaggctgttaataacttgctagaagctgaattgactgcctttctgggctatgatccctatgccagaaatggctggaatactggcaattctagaaatggtgcttatttccgcaaggttgatacccagttgggaccaattgaagtgcaagtgcctcgagaccgcaacggtcagtttcatcagcacacgctgcctgactacaagcagcactctgatgttttggaaagcacgattatcaagctctactccaaaggcgtaactaccagagaaatcgctgacttgattgagaaaatgtatggcagtcattatagtccagcccaagtatcaaatatttccaagcagatgctccccaaggttgaggcttatcacaagcgcaagctaagcgacaagtttttctgtgtctatttggatgcgacataccttcctttgcgccgagaaacgtttgagcgtgaagcagtatatattgccattggcattaaacctaatggacataaggaagtcattgactactgcattgctcctagtgagaacattgaagtctggacagagatgcttcaaaacatgaagtccagaggcttgaagcaagttgaactctttctttctgatggtgttgttggcatgaaaacagccttggccaggacttatcctaaagctcattttcaacgctgcctggttcatgtcatgcgcaatatctgtgctaaagtccgggtggatgaccgcgaaaagatcatgaacgaattcaagcagatacatcaacagacaagcaaaaaagaagctgcagctgtcttgcacaaattctatgccagatggaataaagcttatagcaatgtcatcaaaggtttgaaggaaattgagcccgatctgctggtcttctacaattatcccaaacaaatcagagcttcaatttattcaaccaatatgattgaatcctttaacaacgtcatcaagcgtaaagctaagcctaaggcagaatttccaactgaacagtcgcttgatgcatttattggcatccaggcaatgagctacaatgaccgctatttcaaccgaattcataaaggctttggtcaggttcaggataccttagaatcctattttgattaaataaatgattaaaaaatcaatttacgagaaagaactatttacacaaaagatttgacagtttcatgagtaaatggtacgagaacaaaatcatttggtttaatattagttacctcatcactaacttcttcaacgacaccaattgcctcatggccaattaaagacccactttcacgatcagcaattcctctaaaccaccataagtctgaaccacaaacacttgcacgtataacacgaataattgcttgattttcaccatcgatttttggctttggaacttctcttacttcaactttacctggttctacaaaaactgctgctttcatattatttctccttactatcgtttactttatatacatagtctaatcaaaacagactgtctataaaattactaatattaaatgctactattcaaaaaacgtatagtaatttcatttatgaaaaagaaccgcttgcttaaaacaaacggttctaactattagttacttattaatcttcatcagtattttggtgctcttgactgtcattttttctttttcataatccttgtcatgatctttttcatcatcttcagtctcagtctttataatcttctgatttttagcatcaatttcaacttcggttttcttacctccatcttcaaattctactttccagattggctgatcatcatccatttctaatgaccattcaacaggttgacctgatacctgagtttgagccaattgagtagcttgctctcgagtcatcatattattaagatctaatgcttgcgcctcatcatctgaatctaatttttcagattcagcttttaaaatattgccattacttgcatcaatcttaactttgtattcattttgtgaatcaaaaccttcaatttcatacacatatgaattcttcttttgctctagttcaatctccttaattgattttgagccatacttttcataaaacttattaactgcatcttcttgagaaagattaatacttgcagtacctgtattactttgattttgttctgtgttattgctttgactctgttgcgtttgagtgccagtagaagcattagcctggttaatcgccaataaacttgcgccacccgctgctaagcctaatgcagctgctgccaatgatacttttttaatgttaaactttttcataattgaattcctcgcttttcgtattaattaactttgtacacttagtttacgaaaaaaggaacctttaaaaaccaagatttaatgtagatcaaatgaaattttcttcattttagagttttttctaattaaattgatttttcaataaatatcctatacgcgtggtgctagttaaatcgttctagacaatatgccatattataagctaaaatagctatttctagccgctgttgaaagcctactggacttcttgctcgattattctcagcgttgtaataactaagcaaagaaaagtcgctttcaatgcttcttctaattgccatcaattgatgatcattatgccttctagctccttgcatatttttacgatatggcgtccaaagcacgtatcccatacgctttagcttggctgctaagtcttttcctaaatagccttcatctcctaaaagataatggttaattggatgagcattgatcatcaattctaccgtctcttttgcatcatgtaccgacgccttagtaactgcgtagtcaagcagatagccatcatcactcactattgcgtggactttgaagccataatagtagatttttttcgtcgctttataaccaatatcggctatgccacggaagatcttaacgtgataattgcgaacaggctggcaaactggcactgggaaactatcaataatcaaaaattctccagctgtctttacttcctgattccaaccctgacggatacaacgaattagaggcaagagcattcgagctcgacggttaaaacgagaatgagataagccaacgaagaatttacagaatcttcgttgagattcaattccaatttcagtttgccaaatgagcatcgctaagatagaactatcaggaagcttggtctgatcaacatttttacgatgtttaagtccatcaggcgcataaagcttatacagcgagcgacaaatcacatttaaccgattaaaactaacttgtaaatggtgagaaaaacgattaagcttgagatagttcaattagatcagactcttttctatttaaattacttacaacttgagtctagtctaattggacttttttattaactaaaacgatttaactagcaccacgcgtatcctataaatttgtctcttttttgacttgttctagagcctttacctgtgcttgatctaagggacgatactcattcatcttattaagtaattcagttaatttgttggtattcattttatcactctcgtgttcattagttgcttttgttaattcattttattatagaaccctcaataatcactaaaaggaatttcaaaaagatttagcgtattttatcacctttggaatttttctaattaaaaaagttattgacaaatttagaaagcggttttattctaagaatgaattaaataatgttcttcgaggcagggtgaaattcccgaccggcggtaaagtccgcaacccgcataagcggttgaatcctttaatggtaccgatagttagagtctagatggaagaagaataattttgctgtgctcttttctattttgatagtaggaactgtacttaaattattttttgaatgttagttagaacctcgaggtaattcttcgaggttctttttttgttctgttaggaagtgaaagaaatggaaaacagtgatgaagcatatatgcaattagctatccaagaagcgaaaaaaggactctatcaaacatggaagaaccccatggttggagctgtcatcgttaaagatggcaatatcttggctacaggtcatcatattcgttatggttattatcatgctgagcgtgatgctatttcaaaactaactccagaacaattatttaattcaaccctatacgttactctagaaccatgcagtcattatggtaagcagccaccctgctctgatttaattgtctctagcaaaattaaacgagtggtaattgcgcaagtagatccacatcaactagtaacgggtaaaggtattgccaagttaaggcaacacaatattcaagtaacggttggcgtattagaagatcaagcaaagaagctaaacaagttttatacttacttctaccaacataatcatccatggataacgttgaaacaggcggtcagcttagattatcgaattaatgaggctaaaaatattcgcactcaaataacaaatgaaactgtttatcagcgagtacatagagagcgcgcaaattatcaagccatcatgattggatcaaatactgccattatcgataatcctagtttactgactactgtcactacggattttccacccattcgaataatagtagatcgacgtggtagattactgaatcatttaaatattaagttattaacggataagttaagtccaacttggatttttactcaaaatacaagcttagctaagactccacataatgaaaatatctcaatttttttgatgaaaaacgcttcaatcaccgaagtcataaaaaaactgaccaatgaagagatccagtcggtttatgttgaaggtggtcctaccctagctaatgccttgctagccgaaggtcaagtaaacaatttaattacttacataagtccaattttacttggtcaaaaaggaaagctaggaatttcacccagctccaaaacaactttacataatttacgtgctgaaaagttggatgataattttagaattgaaggtgaaattaatgtttagtggtctagtacgcggcgacgcacgaattgctgctattgataaaaacgatgaaactattgttatgactgttgcttgccagcccgactttactaaaaacttgcaaattggcgattcaattgcagttaatggaacctgtttaactgttgagcaatacactgatacttcttttgtagtaacgatgatgccacaaacttatcagaaaactacttttaagaatttggatatcaatgcccaattaaatgttgaacgttcactacaggtcggacaaagattagaaggtcatctagttactggacatattgatgatattgccaaagttacggaaatcaggactaacgaaaatgctattgaagtttggtttgcctttcctactcgcttaaaaaatcagattgtagcacaaggtagtattgcaattaatggcgtatcgctaacagtaatggatacacatgataatgttttctcagttggattaattcctcatacacaagatgaaacaaatttaagtaagttaaatgtcggctcagaagtaaatattgagactgatatcttaagtaaatatgtcgctaaaaatttagaaaagagaatttaaaatggacgtaaaaaaaattcaaaatgcaattcaatggatgaaaaatggtggtttagtgattgttgctgatgatgaagatcgtgaatctgaaggtgatatgatcggcttagggtctaaagttactcctgaaaatgttaactttatgaccaaacatgctcgtggcttactttgcacccctgtaagcaaaacaattgcccaacgtttaaatttctaccaaatggaacaaaataatactgatccatatggtacagcttttacaatcagtgttgattacaaaaccaccactactggtatttctgcttatgatcgtgcggcaactatcaaggcaattgctgatcctacttccaagccagaagacttctttagaccaggtcactgttttccattagtcgctaaagatgatcaaatcaagaatcgtaatggtcacacagaagcttctattgccttagctcatcttgctggcgaaccagaagttgcatatatttgtgaagttatgaaagctgatggccatatggctcgtcgtccccaactgaaagaaattgctaaagaatatcacttaccatttttaacaattgcagaactacaagaatatattaatagtcctgtgagtaaacgctcagagtttgtaaattttcccactaaatatggcaatttcaaaattaaggctttcgccaatgaaaacttagctattattaaaggaaagattgatcctaaaaagccagttttagtacgtcttcattcagaatgccttactggtgatacgtttggctcaatgcgctgcgattgcggtgatcaattacatactgccatgaagcaaatgaataaaaatggtagtggcataattctttatttacgacaagaaggacgtggaattggattaattaacaaattaaaagcttatggtttacaggaccaaggttatgacacttatgaagcaaatgaaattttaggttttaagccagatgaacgaaattatattattgctgccaagattttaaaagatctaggtattagtcatatcaatttgcttactaataatcctgataaaattgatcaactagaaaataacggtattactattgaaaaaagaattcccttggaaattcctgctaataaggtaaatcatgactatttagaaactaaacgagataaattccatcatttattagaagcactatagtgaggaacacagaaatgaatatttatgaaggaaattttaaaaacaataattatcacgttgcaattgtagcatccaagtttaacgaaaccgttacccatcatttagttgacggtgctattgctactttaaagcaatttggagtacttgaagatcagatcgatatctattgggtcccaggtgcttttgaaattggttttactgctaataagcttctcaattcaaataactacgatggtattatgactttaggcgctgtcattaaaggtgagactgatcattacagcatgattattcagaatgttacaaacgcaattatgcagatgaatcttaaagcagaagtcccaataacttttggtattttaaccactgagaatattgatcaagccttgcaacgatccggcttaaaagctggcaatgaaggttcctctactgctcagagtctattagaaatgatttcgctaaataaacaaataaagtaaatcaaaaatggagctattttttaatagctccattttttgtaatattgaatatgctccttaatagtccaagaatatttaactagtactacgcttttgaattacctagttctgatcatcgttataaccaaaaatagttaggaactgtaagaacaggttgacaaaatctagatataactacaaggcacccagaactgctaagccattggttgaaacttctccaccaaattgtaagtaaatattcttcattctttgtgcatcccaagcggttaaaactgtaaaaataatcactgcaataaacgagaaaatgtaactaaccattgggttctttaagaacaaattaactaacatcgccacaatcaaaccaattaatgcagctgaagcatacgaaccccatctactcaagtcctttttagttaccgtcccgataattgccattgccacgaatacgctagccgaagcaacgaaggccgaagcaatatcttgccctgtataagcgcctgcaataaaggcaaaagtaattccataaataattgccgtaattatcaataaaataaagctggctactggagttcgagttgctctaaagttaatgacaaaggttaatgcgattggtaacaataatagcagccacatcgtccacggatgactaaccattaaggcaaccatctgcctagcaaaaacagtcatcgtaagataggcactcaaggcagaaacaaagacagccagtgccatatagccataaattttacttaaaaagacatttaaaccagatgcatcaactacatgacgacgacctggattttgatcgaactcatccatcagtatttcctccaatctgttagatttctttggttgcttttaatgtatcacttaccgagattaaagagaaatatgacggttcgagatttcttaattcagttttgcgaccaataaattgattcatgatttaaacccttcggtaatcttaattgctatacttaacaaaaaagagctaaagcaaaaatagagtagagggagttttataactcgcccctctcattgcaccggacgtacggttccgtatccggcgctacgtttgtgattatttacgagataaataatattctagcggatcgaccaagcctgggcgatccgctttgcttatgcccaatacttttgggctaagcagaaagttaatgacatgacccgtacttcttttataccaacctaagcgcgtattagctactttatgaatatcttcatcactaaaattgcactttagtgccttgttaatccgcattaagttaatgtatattcgttttggtagtttccattgtttaatgattaccacccgtactttatgacgcagccattgactgaacttaattagaaaatatttcatgtcgccaactctaaagtaattgacccagcctctaactacttgatttatcttagtaaagactagtgatagaggctgagcagctgcttttctgcgacagagaagttctctcatcttgtcataaagcttgattttgcggtcatctcctggctttgcttgccagtattcgccacttttccagaaggtaaagccaagaaagttgctcttggttggtcgtacaactttggttttggttgcgttgacctttaggaatagctttctttctagccatgatgaaattgaattcatcacacgtttggctgatttaccgcttttgacaaagatattgcagtcatcggcatagcggacaaagcgcaggcctctttgttccaattctttatccattttatctaaatagatattggatagaattggtgaaagagggccgccttgtggtacacctagtttattaggcttaacccaaccatcttccattactccagctttaagaaaggctcgaattaaatggagggtggttttgtcatttacttgctctctaattattgaaattaatttatcatgatttaccgtgtcaaagtatttctcaatatccaggtcaacaacccattgatagccttcgtttaaatattccaagacttgttcaatagcgtcatgagcactgcgtccgggtctaaagccatagctatgctcactaaaatgaggatcatagatcttcattaatacttgggcaatagcctgctggattactcggtcaacaaccgtgggtattcctaaaggacgtttcttaccattagctttaggaatgtagactctgcgaacagcttgcggacgatacttcatcttcatgatggcgtcctttatttctacttgatgctttttaaaatagctatcaagctcatcaactgttctcctgtctacaccaggcgctcccttattgattttgactctcctgattgcttccttgagattattttgacttaaaatctgttcaattagttccatctcgtgatatctccatttctacttgtaaatttattcagaattgtcccaattgctttcaccatcaaagagttacgttctctttgtgctaggctatcctcttatccggactgtctgaacattgcttatagcgagatatgctcttacaaacattaggcccttcgctccagtttcattacaaaaccttcagcactactacgacctcagctgacttctcgcgattaacctttttcgaccaggcttacgatcgctgatattaaagcttactcggtttcacctgtccacgagatctctcggggtaagacattcatctttaattttccactgccccctggtttaccgtcttggttttacggttgtcctttggactttaacttgtgctgcagtctcatccaccatttggcctgaccaggtttctgtacgtaggctcggaaaactcgctagccacttccttcacccatagcgtcaccgctaacggcttgtggttcgctacacttggcgacaactacccgtgatctagactttcactagactagacaaatgccatgcccgacacacaacaaaaatagagtcttcactgaagactctattgctttttgaatattaaattaatcagtttctctttctaaaagctgcaagactgaatattcctgcgattgcggcaaacacagccccaatagccgtcaacccagtttgtttttcaccagtttgtggcaaaacattcctttgtgtaactgctttttgaagtttaacttctttaacagataccgcacttaccttagaattggctaacttaactggtatttctttcttagtaaattgacatgatgacactttttcactctttggagcaacagtcttattctttgctactttatttattttactcgttttctttgtcttatttacccgctcagcttttggtggaatatttttttcttgcttgtctatcgtttcaggatgtggagccacattattttctgatggtgcagttggctgagttggagttgtcggttgagtcggagtttctggtacatcaggtgtatcaggctgtggtgcttttactggaaggatgtctacaacatagctattttcaatcttcatatctgattctttagaaccatttaatctataggaaactgtcacaatatatttaccggctggagtttgaccattaattttattaatcttatttctgaaaattgaaagcaccaaaatcaagctcaagtcctgtcactattgagctttcttagacgtaattagtttttatatgatctgtttcagtgcaatttgtatgaatcgtggcagttggttaataaagtcattgattacttcatctatcttttcaaaactattctgtttaagctcttttaattctgaaattaagtagaccaatgcatctacgaatctaatatcaggtaaggattcgttcattagatagaataaatctccgattgtcttatcatctgtattttgtctttcctgccaggtcaatagatcataagttattgctgtaactgcgatatagccacattggccatcatagctttgaacttgagatttatctaaagcaagatattgcttagacgtcttaaaatatgtttcaatttgccatctacgaccataaagttggatgatttcttcagggctaagctttgtctgagtagtagctaaaaccaaatacttgttcttgtttccacggttggagacaaagacgagctttaataaaaagctatgtccatgatattgagcctcaactatgcttgaataaagataatgtttctttttacggatgtttgaagcagccaaacgatcatacaagtctttaacgctatagcggcgatggcgataaatgtaataaatctttgaactcttcttgatcatgccaagtccatctaaaccgatcttctttaaaatccaaaacattcttggagaagaaaaccaagaatcgaataagacgtatttagcttctactcctaatcgtaaggcttgtctaatcaactctacagttacatcattcatctttctctgagcttgatttctccttttaccagaaattgaacgttcatcagcagtaatgggagcagctccaatcatatttttcttggttttggttgacatcaaggcaaagttaaccggcaagaaggtattgccatcgctccagcctaaagttaaaccacgatatccgttccaatactcatgcttgtcatggtcatagactttagctagcaattcggtctttttagaaaaagaccgagccatcagcgtatcgtcaacgataaaagcaagtcggcgtcttttatcgataaatggttttaagcagccaatgagccgggctgcaatcaagcataatagtttttgccagttgattcttccatcgttaagtacattgcgagcagttctaacggaaaaacgtttgtcatccttagctctgaataaagaaagccgagcaaaatgtactgacatcagccaagagataatcatggttaatgaaacggtggatttacgcttaaaattgacttgtttagttaacttagctagaccaattagattaataaatgaagaaattaaggatttagtatcattttctgtgtcgatttgttctatactgttcattgcgcaggatctcctttactttttaggtcgacacttaaagtataacgcagagagagcctgcgtttttatttttgataagaaaaagccaagaggcgcggggaaggagcgttaatcttagctttcaagtttcagtcttatttcctttttcatcgatgatgccaaccaattgaacatcttgtgcattaactggaatattttctaataagtatccattatagacagcattaggatttcttacattaaatactccagttacaccttgatgataattccagtcttgcgcttctttagatccttggtttaaagtctcatctttagtagcgataatttaatgtacttcaacatagaaaattctcttattctgatcttctttattaagtccatgaataattaccttatgactggtatttgtatcataactataaaatggcattaaagtggttaaatctcttgcctgcggattcactgaatagccatatttatcaattacctgttgaatctttgataattgaatcttatagctaccaccctcataaaaagcttttccacttgtgtccaatatattaccagaattagtaatctgaataacttcaccaacttttggtaaactctcaataagttgtggtatattgacagcatcataactaccatcttgattcctagttaccaaactaattggagtattctgagcttcatcaactgtccaaagcttttttggttgtttatatgtgcgtacataaatactctggtcgttttgagcttttagatctatttcattgaattgatttcctgttggatcaatgatcaagggtacattcatttgcgcagtagtttcaccaggaataactcctctgaacccaatctgtcttacgttactaattgcggcagcgccaaagtttttcatcatttcttcataagaataccaagtaccattttgggccaagtaataaactgacaaagcattatcattaatcaccttaccatttttaataaagactacatttgctgccttagtactactgatttgcaaacttagtttttccttattggaataccatgcattgatcattaaaactgcttcatcattaggattagggttagagtcatttttactattaccaatcatttgatcagttttagaaacattttctagagttaagtgagcctcagggtcttgagcattttgctcaattaaaatggcattattattcttacctgcttctgcacttgaaactacttgagtctgattcgtgttcttgttcttagcggtaatagaataatcatacttaattgagccgtcagccggcacgttagttatattagcatttttaccttgtccatttgtttttagtccactagttgtattattttcaccgagaataattgcttgatcagttttatcctcagagtctaatttctgatacgcagctgatatttctgtcttaattttattttgatattgatcaccatttctttcaaccttttcaacagatgaactattttgagtagattgctgtttagattcaacagttagaacttgttctgacttttctggctgattagcagtagtctcagcagcatgtacttgacttccactaaaacccaaaaaagtcaatccaattaaaactgaagcagttccaatagttaattttctaatcgaatacgtttgtttttgatcaaatttatttttatctaacatttgaatcacccttatgtgaaaaataccgtttctcttttcgccattataataacacccgttgtaagtgccttcaaacattatgcataatttttaccaaacaaaaagcatgaccgaagccatgctttttatcttttatgtatctacttatttttgaactttttctatgatcatccgaataatatttaatataaacatccaagcaatgttataaatccaaatctcacagatcatccatagtgaaatccttggtacaaaccagcccaagtagcatgcacatgcagcaaaaatttgtgtaattacaattgcccagaaaagtattggagctggaaatggtctttcgaagaaccaacgagtttgacgagtaacaaacaatagtaagtgcccaccagcaactaattgcaagaacataattgtctgcaattgtgaaaggtttccaacttggaaaatgctaattgagccaggatttttaactgacatatatcctataaatagaagcaacattgattggattacagcaaatacacccaaaattgatgaagttgtaagaatcttcttcatctgccatctgattggcttcttagaaacataggtattgtcataagcaatagtcatgattggtaaatcatcaagtaatgacataaccacgatcataattgctgttaatggctggaagttcaataaaattgatgacaaaactaccaagaacataatgttcattgtcaaagcaacacgataaattgtgtaacttgtaattctggcaaaaatctttcttgcctctgtgattgcagtttgaataactgacaaaccgggtgaagttaaaattaaggcagcagcacttctagcagcatcagtagctccagcaaccgctgtaccacaatcagcttgcttcaaagcaggtgcatcgttgaccccatcaccagtcatcgctacaatatgaccttgcttttgcaaagttttaacaatcgcatatttatgttctgggaaaactctggcaaaaccatcagcttgcgcaatcaacttttccaaatcggctggaacatgatcaggatcaagattcttaggaaaaactttagtagcgttataaatattagtacccatgcctaactttttagcagtttcaatcgcaatcgcggtgtcatcaccagtaatcatcttgacactgataccttcacgcttacaatcatcaattgttttcttagaatcgtcccgaggtggatcgaacatcgacaatacaccaagaattgtccaagtcttgccttgatccttactttcagctacacctaaggcacgataccctctttttgctaaagcatcagtggtatctagaactttcttttggacatctggatcactacttaatttagctacaacctggggagcacccttaatagcccataattcttctttagtattattattaattaaatgagcttcaattcgcttagatactggatcaaatggaataaacttttccattgtccaatcagctaaaacactctgatctttcaaagctttaataactgcgttgtcaattggatcattatcttctttccttgaagctaaggcgccaattttaattacatcttgagcatctttagcgttaattaaagttgtatcacccaaggttaattgatttttggttaaagtaccagtcttatcactacataagatgtctaccccagccatttcttcaattgaagctagtctagaaacaatcgcctttttcttagataggttcaacgcacctaaagccaacgtaattgaaaagacagttggcattgcgacaggaatagaagcaaccataattaccgctaaaactacggcaacgataattaagaaattaccaatcttaaacattgcttcttgagcaggacttttaccaccagctgaagcaactaatttagcagttttaccaaagaaagtattagagccagttgcaataacaacaccggtcatctcaccttttttaacaatactgccagagtaggcctcatcaccaacttttttagttactggcaaactttcaccagttaaggcagcttgatcaattgaagcgtagtcccaagcgcaaatctgctggtacgatttgccctagccgaattttaacaatatcgcctggaactaatttgcttgcatcaatcgtttcaaatttaccatcacgtaaaactgtagcagttggagctaagcccttcttcaacgctgctaacgcatttgacgctttacgagattgccaaaattcaatacaggcattgaacaacagcaatacaataataatgaaaaagtcatcccagtggccaataattgcagaaataattgcagctgcttcaatcatataagcaattggaccagtaaagtcttcaaaaactttagccccattggttcctgcttagcagtaatggcattcggtccgtacttttgcaagcgagcctgaacctcttgagaagtcaaccctttttgtggatcaacttttaacttttttaccacatcttgaatatcatctttttcaagatctgtcttctcttgtttactcattattctgacctctctactttattaaacactcagatctagttttagtataaaactatttcagaataatgtttaagagaaagccttacaaattgagactgtaaaatagtttgtgtaaggatgaatgattccttaaatttatttctttaaacattagaaaaaggagttcctttctcgtatgattggtttgaacaaaaaaaacacatacagaaagaagaactccttcatgaatgattttaccaaagattttgctcaagctctattcaatccagacaaaataaatgatttattgcgcaaagaactacaacaggctgttaataacttgctagaagctgaattgactgcctttctgggctatgatccctatgccagaaatggctggaatactggcaactctagaaatggtgcttatttccgcaaagttgatacgcaatttggcccaattgaagtgcaagtgcctcgggatcgcaacggtcaatttcatcagcacacgctgcctgactacaagcagcactcggatatcttggaaagcatgattatcaagctttactccaatggcgtgaccaccagggaaatagccgatctaattgaaaagatgtatggcagccattacagtccagctcaggtatcaaatatttccaagcagatgattccaaaggttgaggcttaccacaaacgcaagctaagcgacaagtttttctgcgtctatttggatgcgacataccttcctttgcgccgagaaacgtttgagcgtgaagcagtctatattgccattggcattaaacctaatggacataaggaagtcattgactactgcattgctcctagtgagaacattgaagtctggacagagatgcttcaaaacatgaagtccagaggcttgaagcaagttgaactctttctttctgatggtgttgttggcatgaaaacagccttggccaggacttatcctaaagctcattttcaacgctgtttggttcatgtcatgcgcaatatctgcgctaaagtacgcgtcgacgatcgtgaaaagatcatgaacgaattcaaacaggtgcatcaacagacaaacaaagaagaagccacagctgtcctgcatgacttctataccaaatggggcaaggtttacagccatgttatcagaagcttgaaagacatagaaccagatctgctggtcttttataactatcccaagcagatcagagcttcaatttattcgactaacatgattgaatcctttaacaatgtgatcaagcgcaaagctaagcctaaggcagagtttccaactgaacagtcgcttgatgcttttattggtattcaggcaatgagctacaatgaccgttatttcaatcgaattcataaaggctttggtcaggttcaggacaccttagaatcctactttgattaaataaataattaaaaaatcaatttacgagaaagaactatttacacaaaagatttgacagtttctacaaatttgtcattatacgataaaaaaacaattattaaaatatggttattttattttcaagtagctaatgaccttatgaaggcaatctagattccttatttctctgcaaaaattgtttttcagcgagaagttttgcaaaaaacacagccaaaatgtatcactaggtttggttatatattttttctataaaaagatttattttttagcccggatttaaaattgaagtgcaacactaagtgttaaacaaaaaggccatgaagacctaaacttgaagtgacgaaaaatcaagaaaggaagatctttatgaccaattcaaattctagcatttctaagcactatcatcaattaaccagcgtacaacgtggacaaattcaagcaatgctggattccggcataacttcccgtactgttatcgctcaagaagtcggctgccataagtcgacaatcagtcgcgaaatcaaacgcggaagtgtcctgcaaagagacagcagctatttattgtatgagcactattacgctgatactgcacagatttattatgagaagcgtcgcaaaaactgctatcagcgcaatccattgaagcattatgctgtctttttgagaatgctctccagacgctttaaagctaaatttgatgccaccagcatcgatgaattcgttggtgaattcaaaaggactatgccaggctacccttgtcccagcacaccaactgtctatcgctatattgatcagggcttgctggacataagcaatattgatctgcctatgaagctcaaaagacgcaggaacaagcgtcatcacggccagagcggtcatgctttgcacaagaagcatcttggcaattccattgaacagcgtcctaaagagattgaagacagaaaaacgccgctgcactgggaaggagatctggttaaaggcgtcagacgcaagaatcagcctgctttaatgactttgaccgaaagaaccacacgctttgaagtagttatcaagattcctgactatcgggcaagcacatgccaaaggctgcttcaaaatgagattgacagacatcctgcctggtttaaatcgatcacgtttgacaatggctctgagtttgcggatatgaccgagatcaaaggctgccagatctacttcgcccacccatattctccatgggaaagaggcaccaatgagaactgcaatggacttctgcgtcaattcttccctaaaggcaaaagcatgaaagataagtcagctgcttatgttcaacaggcaactgatgccattaaccgcaaacatcgtcgaatccttcaatatcacacagcagaggaactcttcaagcaatatatctcttcataacctaactgttgcacttaatttgacaattcagggatttattttttagttattgaatatttaaataatgtttcgatagtctatttacatgctaaacggtcattatgatgctttgatttaaccaattcttatgctaatcatgatcaaaaaattattcatcatcaatgatcaagaccagatcgtgcaaaaaattaattctaaggtcagaaaaggcattcatcatctcaacgttatccttctactaattctctaactatattgtagttacttgcatcatctgaatcagaaatatctgcactagcttttctctcatttttatttactctttattttttgcgcttccaatcttatcttttaaatccaaagctttttcataaataaagaaaccaattacacatgtcaatatatcactaattgcttgagaccaaacaataccgtgatagcccagcgtcatcttcatcaattctagaaccacaaaataaatcacaccttgtctagcgattgccataataaaggcaccccaagcattaccaacagattggaaaacagttgtataaaccaatgcgattcctactacaggcgtagtaacaatcgtagctaacaacatgtaactaccggcactaacaatatccggctgattcatgaataatgctgtgacaggacgggcaaaaacaattaataatccaccaacaattaccgcatatacaacttgaactaaaatatcaaagcgaagaatatctctaagccgccgccaattctgagcaccatagttgtagcctaataaaggttgtgcaccaaaggcaaaaccaacaatcaccaaaatcacaattccatatattttttgtgtaatccccattgcagcgaccttatcagcaccataaattgccagtgacgaattcaataaagccatgccaaagctttgagcaaaattagtaattgatccaggaataccgattgctactacttccttgattgattccgcattaattttaattaacttgggatctagagtaatgaatcttgctttttgcagaatcataattactaaaatcaagtcagttacaacataacctaaaatattggcaattcctactcctgtagcaccccattttaaaacaaataaaaaaattggatctaaaatgatagctaaaatagttcctgtcattgtggcaatcatcgcctcaatcgctaatccctctgttcgaattaagttctgtggaataaagctcagaataataaagactgctccaatggaaagcacacgataaaaatcagctgcatcgttataagttgccgccttggctcctaatatagttaaaataggatgttcaaagattagcaagattactgttaaaaacagaccagtaatcattccaccatacaagcaaaaactgctgatttcgtaattcctgcaactagattagtatcgcctgttttggcaacaaacattgtatctgccagattataaatcatggtagtgatcatacccaagactacaggtagtgctaatttaaaataaacttgcttaattggtgcctttgcaaataaatcttccatttgtttccctcacaagaaaaagcaacctagaagattcttcgggagtcatcctcacgattctaagtcgcttatgttacttgatattcatgtattatatgttaatctaaacaaattctttgattagatgcaatggcgtttttaattcggtaagtgtcattgttttttgtttatagcatcagagaaatctccatctatgctaaactattaccaaaatattgaaggaaaactattatgcaaattaaagaaattatcaaacttaatcaatcaactgagcaagaacttttaaccatctgggaaagcagcgtccgcgccacatataaatttttaaacaatgatgaaatcttacaaatacgcaattatgtaccacaagcgtttaaacaagtggagcatttattaatcattatcgatcatgaacaaattaaaggcttcatgggaattaatggtcaaaaagttgagatactcttcattaatgccaaagcacgcggcaaaggatacggcaggaaattgttgaattatggtatgcaaaagttaaacattgatgaattagctgtcaatgaacaaaatccaaaagcagttggattctatgaacacatgggatttaaagtagtggaacgttcagcaactgatggtcaaagcaatccttatccaattttgaggatgaagttggataaagaaaagtagtaaacagttacgcgtggtgctagttaaatctttctagacaataagccaaattataagctaaaattgcaatttccaaccggctttgaaagcctatcagactacgtgctcgattgttctcggcattgtaataggtcagaagcgaaaagtcgctttcaattgttctgcgaatagccatcaattgatgatcattgtgctttttagctcctgtcatatttttacgatatggtgtccaaagttcataacccatttgttttagctgttgatgcagttctttgcctaaatagccttcgtcgccaagaagatagtaattagatggatgggcattttccagcagttcaactgtctccttggcatcatgaactgatgcttttgttacgacataatcaagaatgtaaccgtcatcgctaacaatggcatgaactttgaaaccatagaagtaaattttcttggtggccttataaccaatgttggcataaccgcgaaaaattttagcacgatagttgcgaattggttggcaaacaggtaccggaaagctgtcaatgatcaagaaatgtccattcaggtcaacctttttattcatttcttgccgtatctgataaatcaattgcaatagctgacgtgaacgccgattaaaacgtgagtgtgataaacaattgaaacattcacagaatcttctttgtgattcaattcctgtcttagcttgccagataagtaaagccaaaatcagactgtccgtagttttaatttgatcaacatttcgccgatgagtaaactcagccggtgcatacaaacgataccagtgccgacaaattatcactaaatctttaaaactaacttgtaaatggtggctaaaacgcttaagcttaaggcagttcaatcagatcagactcttttctattattactatttacaagtcgagtctaacaagattggacttttttattaactaaaacgatttaactagcaccatgcgtaaacagttatatttagttattcctttttcccttgacaaaaatatttttaattttcgagtaatatcatttgtctaacaacccattcttctatattatagaagacgctgctgatacggatgtataacggactgataatcctttccgtaaattgcctgtaagtcagataaggcgaacagcaaggatacctgctgttttctgaatcttggagatattcttatcagagataggtccaaaagactttctgccaggcgatggtagtcaatgtatttcagcgtaaggctttttctgagctggcaagcacaataagttgatgtgaaaatcagcttgcatcagggtttttgacctaatattaaggcggaaaacttaattggaacctcaatgtaatgaccaacaagcttgtttgctgtgacgtatgcgatcaaaagcatgctataacaggtcagaaaagaacgagtagcttaatcggcaagattaaatgatactattaggtacaatatatagaacgcacatcaagtgaaagtttacggtaagcaatccgtttaggacttcggtaggttctttgaacccaacgcaagaaagaagcataaatagctaatctgtgggcggtcttgttatcctatggctgaataaagaaaagaaaagtatgaaaagcatattttcctaacgttggatgcaaaaatgattagttgctaataacaaccagtagcattaattaaaaggagaccggtttgtctatgaagacagctggtctctttttaatattctaattattttactgtattatcacctgacactgtgtgcatccctaagtgactgccatttgtctccttacctacctatgcatgagttgccttaccaccaaagattgaattatcaccgactacagtcttcaaatcacattgatccacttcaatattttcagccaaattatcacctgaagtcgttgccacatcaagatcatcaagaatttggctatctttaatggtaaagtcaccgctaactagcttaatcttaccacgatttagcaataccttctttaatttaatatcacctgaagtttcagttattgcaacttcatctacttttactttcttcaaatgaagatcaccactaagagcagtaaatgttactgtctctaactcaacttgttttacaacagtgtcaccactagtcaacttcaaagtagcgttaactaatttatgttctaccggcactgtaacttttaatgcaacaatatcatcttgactcacaatactgatttcaacatgctttcttttccagaatttaccattcttgcgttcaaccttaggttcttttaattcaagagttttacccgcattagtcacaatcggcctcttatcttctggaccgtggtaatgtacctcgaactgatcgccaccaaccaatgtaaaatcaatatctactaaatccacgctcaatttgtcaaagctatcattgcttaaaactttatcaacaattttcacttcattgtcttcatttttgtcaaaaaacattttctttctcctcatttttaccttttagctattattcttatttttctttaagtttactatcatattgctatttttcaaccgtaatttactaagtggtcaaaatttgcggctgaaatgcaaaaatagacaacttaagttttaacttaagtcgtctatccttcatcctaaaattttctttttcaattcgtctaaacgatcaattttaaacgtgaacgcctgtatccctaattcacttgcagctttggtattattttccaaatcatcaacaaataaacattcttctggctttaaatcatatcgttttaacaaacattgataaatctgcttatcaggcttcatcattttttcctgtgcagaaaagacaaaaccatcaaaataatcacccatcgaagaatttttaacaaagttagcaaattccatccctgtattagacaaggcgtagatatgatagccttgctttcttagttgatccataaaacgaaaaacaggttcatagaaatctacattttcaggccaagttgtcataatttgcttaaccttcttctgcagctcaacaggtacgcgactaataaaaatcttagtcgcctctttttcatcgatttttcctgcatcaatttcagaccattcttttgattcaaaaatcgtttttctcaataaatcatgttcttctgatgttaattgataatgatataaaatttcatcaggattgtaattcataatgacgttgccaaaatcaaaaataatattttttaacataaaatgtcccttctaatacttttaattcacatcttaattttatgctttcttgtatcactgcgaaagaaaaataaaaattgactttttctttttatcaaataaacacaggataagtgaagtcattaaatcttttagccaagagcattgtaatagacacataatacagtataatgattattatcaattacataaaaaggatgatgattttgaataaaaaagcattcagcctagacggcaatcaattaaaaactttagcagttgtgtttatgatctttgatcatatctacagctatcttctattggatattctaccaaattggtgcagtttaattgctcgcttcgttgctccacttttcgttttcatgttaattgttccccatgaccctggcattgcatatactgcataaaagtcattgccagtaaacttttcaagatgcgttttgtctttgccaaattcatccttacctgtctcagtagcattttgatattttacaaaagtatcttttagactatttgcatcaatcttcaatttattagctagttcaacaattgaattggcatgtacatatacttggggattttcttctactttatctagtttttccttaaatgatgaatccatttttttgccatcataaatcaaataatacttttcacttccatgcttgtacatttccgttcttaaattcaagaaattatatggtgcctcattagaaaaacgtttgccattctcatcaattaacattgtttttgaataatcaggtacagtattccaagtgataaataattgtggggcaaaatcaatcgttccattcttataaacatcattatttgaaaactctgcattaacagctttcagtaaactataaccatcaccagtattggcaggactagcttcgttaaagacatgaaccttagcaacagatggtgtgaccttattaagaagatcatccttttcataagaagcaccgcctgtggcaattactacagctttagcactaatagtaaattcacctgctgaatttctcacttgcaaccctgatactttggttccatcatctattatttttgtaacccgactgttcaaataaaacccgccgccatgttctttaatgtaattagccagcatttctactaaatgtgcgccattagtgaaattagcaataataattggactatcagaaaaaatacttacttgcgaatttgttaaggctactaaatcatcgaatgtttttccagactcttctaacaattgttttaagaattttcgatcgtgctccttagttgcatttttattaacatgatcgacaaagttcaataaccttatcattgtcggtagctataattacagtcgcattattaatttgctgctttaatccttcttcactcgggtaaacaccccaatgctagtcgggactataatcatccgttttttgatcaagacaaacttgtttgtaaaaagcacaaacttggcttaaatcttgaacagtagcagttcttatttgcaaaaaaatcccccttctattctatagttttcgattataacaaaaatgcatccccttcccaagtaggatgtggacgcattcatttaatctatattttattcatcaatcttaggggccttgccgatttgagcttgcatcatccagattctcttttcaatatctgtatggcatgacgttaagatatcatttgagccatagtcgccttcctcgtcacttaccttgatcccttcttcataaaggtgctccaaataacgataatcagcaatgatagtcgcaaatctttctctagttgaaattccccattcaccaggatgagcttcgatcttagtatgatcaagcacttcctgtaagcttgaatatggtgacccatcaattgtaatcaatctttcagagatcaagtcacgttgttcatcaagttcatccattacctcgtctaaatatgggtgcaattttaaaaattcaggtccacgcatataccaatgttgttggcggacaaccatcattaattgagtagtatcagcaacagcttgatttaatatttctttggttttaggatacttcataaattagccctctttcaattagtaacttactttatataactattatatattttgttatcgcttttatcaaattatatgttttatgtaataaaaaatgtgcccgaacaagcacatttttaagtaagtttaaaagaaaattttactcataataatcatgaataccaacaaacaagttgagctaactgcggcagccccaaagactgaaccgccacgcttaaagattaccttgaagttaacggaaattcccaatgcagccattgccatccctaaaaagacatatgctgcttgcactaagaagtctaaagtccgcgcagacattggtaaaaatgtaccaataatactagttaagataaatccacccaagaaccaaggaattggtaatttcttcggtgctctagtatgttctgcttcactttccgtaaccaaacgcttttggtaccaatagcccacaattaaagcaaccggtgctaaaagtaatacacgagataacttcataattagagcgctatccaaactgacttcaccaaaagcacttcccgctgcaaccgcatgagcaatttcgtgtaaagatccacccgctactaccccatattgtgtatcagttaagccaagaagcggtttgagcacgatttcaagtaatgtaaacaccgttcccatgacacaaacaacagccaccgctagaacttcgttttctctttttctgtcttcatcgcttgtctcaatttgtggtgacacgcccataacggcagctgcaccacaaactccacaaccacaagccgacaaaatagctaactcatcttcagcaccaaacttacggctaagccaataagtaagcacaattgttccactaactgccagcgccgcaaccagtatagtcttaactcctgcatcagccaacttagtcaaattgagtctaaatcctaacaagataatccctaatcttaaaaacttgttggaaataaaacccatgccagctttcgcttcagcttgtacgctctgaggcgttatttgcagtgcaatccctaataacaatgcaattaccaatgccccgattaagtttacgtatggcaatttagccaagaaaattcctgctacagaacaaaataaggtcatcgccgtagctaaccagaatgatttagttttaattatgtttgtcaacaaaaatccctccatatgtgatctgtttaatttgacaaacacaactccctttatgatgatagtaataagtatactattattttctattcttgacaaggcaaattattaataaattcacattaactaaaaataaaatattttggcattatttagttaagtaggttataatacttttgttacggagtgttggcagagtggtaatgcaccggactcgaaatccggcgaaccaagttttccttggcgcgcaggttcaaatcctgtacactccttttgtcaatatgtggaaaagaccaagtgcaatgcttggtcttttttatcttagtcatttttaatatttaaatgctacacttgctaatagcacattatttaaagatatagaaaagagattatatattatgtgtacttcaattattttcagtccacaagatcactattttggacgtaacctcgatcttgagattactttcggccaacaagttgtagttaccccacgcaattatgctttcaacttccgcaagatgcctgaaatgaagcatcattatgctatggttggtattgcacttgatgctggtaattatccgctctactttgacgcagctaatgaaaaaggtttaggcatggcaggacttaactaccctgacaatgctacctactatgatgaagttgccaataaagacaacattgcttcatttgaatttattccctggattctgggtcaatgcgcaactgtagcggatgctaaggtattacttaaaaagatcaacattgttaaccttaatttctctgacaagatgcaggcatccccacttcattggttaattgccgataagacaggtgtttcaattgtcgttgaaaccgataaagatggaatgcacgtttatgataatcctgtcggttgcctgactaacaatcctcagttttcatgtcaattatttaatttaaataattatgctgatgtttcacctgcaatgcctaagaacaacttttcaaaagaggtcaatatgaatggctacagccgtgggcttggttcacgcaatttgccaggtgggatggattcagaatcgcgctttgttcgtgtagcttttaacaagttcaacgctcctgttggtaaaagtgaggaagaaaacgtagacaattacttccatattttgcattctgttgaacaacaaaagggacttgatcaagttggccctaattcatttgaatacactatttactctgatggtaccaaccttgacaaggggattttctattacactacttatactagtcagcaaattaatgtcgttgacataaacaaagaagacctcgatgctaaggaattaatcaagtatgatatgttaactaagccaacatttaatcaccaaaactaaataattgaaaaataatgttaattttatttaaagattagcattatttttgtttttccggttaaaatagattgtacttatatagtaattggggattttcttattaatgaataattattttgtactgctactgtctgcggcagttttgctctggcttatttttaatatcaaaaattcacgtcgtttcaatctatttgatcactggcttcaccaccaattggtcaaacgtcatgattgctacagctggcaggttatcgcttttattaatgatcctaaactaatggtcgtttgggatgtattattagcaggcctacttttaaacgaagaacgaaatctaaccgctctttgggtattaggaactctaggatttgctgacatttctggtattattctaaaaaaacttattcggcgcaagcgaccattattacattccgataaagaagatggctatagctttcccagcggtcatgttttaggtgccacaaccatgggcttaatcgtactacaactatttgccaaagatcttggaaccggatttgttattgccatagtagctatttgggcaatggtaattttctctcgtttaagtttaaaggcccactatccttctgatgttcttggtgctactagtttagcaatcgtttgtttcagtatttcgcagcaactatttttagcgatttaaaaaggatcacgttcagcacttgagcgtgatccttattttttattcatgaaagcctaccataatgccgccttcttcagcatagaaactacataaagcatgcattggacgaatagtaatttgagcttcagggtattcctccaatattttatttttaattatttctgcatctttttcattttcgcaatgatcgattatcacttcgccaccgtgataattatcttccttcatatacttaataatttcacggatggcctttttcattccacgagccttagtaagtggctcaagttttccttctttacttgctgttccgatcaagttgattttgagcaaacctgcgattttggctacagctggtgaaacacgaccgtttaaagataaattatgtagtgattgcaaaacaaaaagcaaatgagtctgcattctaaacttagcaattgcttcttctagatctacaaagcgcatttcaccttgcagcattttctcaataccatggactatgattgctagctcaggtcccgcacttcttgaatcaactactataattttgctcaagggatgtttttcctcatacattgcttttgcctgaagggctgaagaaaaagtgccactcatcccgctggtcattgtgacgataatcgctttttctgttccttcaagtgcgtcaagccatgcttgaatacttggacaagttgttttgcctgccacattattttggttcatattggacaaaaattccttcatattcaaatcttgattatcaaggtagtcctcaccaccaaaagaaattgtcagaggcactacttccaaattacgcgccggatcattattcatattggcacttgagtcaacaattaatttaatattttccattttagattccttattttttgtatttattttaatacatatattatagtcctttgatatagagttttttaggctgctttactaatttttaaaatgtaaaccgctttcatatgtttacaccgtcacaaagttaggctaaaatttgagatgtaaagcggagcaaaaattgttccgtatggtatgaaaaacataccataatttttgaggaggtttattaatgctcaaatcagttattgaaaatgtacacgcacttgaaattttcgactcacgtggtaacccaactgttgaagttcacgttactctttcaaacggtgtcgtaggtaaggctgaagttccatcaggtgcttcaactggtgaaaacgaagctgttgaattacgtgacggtggttcacgtcttggtggtaagggtgtttcaaaggctgttaacaacgttaacactgaaattaacgatgctcttaagggtatggacccatacaaccaaccaaagattgacaagaccatgattgacttagacggtactccaaacaagggtcgtcttggtgccaacgctatcttaggtgtatctatggctgttgcagttgcagctgctaacgatgctcaccttccattgtacagataccttggcggtactgatcttgaaatgccacaaactttccacaacgttatcaacggtggtgaacacgctgacaacggtatcgacattcaagaattcatgatcactccagttgctaagacttcattccgtgacggtttcgaaaagatcgttaacgtataccacaccttgaagaaggttcttgaagacatgggttacgaaactggtttaggtgacgaaggtggtttcgctcctaacatgaagaactcagaagaagctttgaaggctcttcacgaatcaatcatcaaggctggttacaagccaggtgaagatatcgctattgcatgtgactgtgctgcttcatacttctacaacaaggatgatcacaagtaccaccttgaaggtaaggttcttactgatgaagaattagcagattactacgacaagcttttggacgaattcccagaattaatttctatggaagacccatacgacgaaaacgatgttgacggtatggttaagttcactaagagccacaaggaccgtatccaaatcgttcttgacgacttcatttgtactaaccctgcacttttgactaaggctatcaaggaaggtgctggtaacgcttcacttatcaagttgaaccaaatcggtactgttactgaaacccttgaaactatccgtctttcacgtaagaacggttacaacactatgatttctcaccgttcaggtgaaactggtgacaccttcatcgctgacttagctgttgctgttaacggtggtcaacttaagaccggtgctccagctcgttcagaacgtgttgaaaagtacaaccgcttacttgaaatcgaagaagaacttggcgaaggcgaacgtcttgcattcttcccagacgatgttgaccacgattaatttcgagttaaccgagtacaatttcaaaaaaagcatgagaattaattttctcatgcttttttgttgcgcttttacatatttattttatcaatttgctaaaagccttatttaaagtgcgatccttaactacttttaccataattggattttcgtttttagattgatcaagcaagataattggatttttatccttcaaacagaacaagtaagtattatgccacgatttaaaatcatcattagcaatggcaagcacattatagtcatattttgttttgccaattggactgtagccgatctcaattgtttttttatttagaataaatcgattagtagtcaatactttggggtaagttgcaccctttttagtctttaaactcttttttccatcatagaattgataagtttgccctgacttttcaccccagttattaactttcctttttagtttaacagttttagcggcatcccagattctagttgctttttctttatctttcctcttatctggcttagccttctgtttaggcttaacttgttttttgtctgaaaattgcttttttactggttttgttttctttttagcaactgttgttttcttagctttttttacttcaccaatagttactgcatctttaccgaaataaacttgactacaaccagttaaagtcgttgctaaggtaattgcagcgagtcctattaaaatttttctattcataattgctccatttattatttcttataatattattgcataaaatagtctcattaaactttaggcaaaaaaatagagctaattttccaattagctcgcggttttttaataaatggtgacttgataacgattggaacgatctgtttcttctggtttttcagcaatcttcccaactggcactataacactcgtttgaaaggcaggatcaatgcctaattctttttgcaattcaccggcatcatttaacctaactgcaccgcccatgacataaactgaacctaatcctaagtctgttgctgccagcataatattttctgctgcacaagatgcgtctcgttcaccaaacatgctatcttttttggtattaattacaaacaataccggtgcattgtagcaagcattatcagttttttctttgatcttattgcgtaatccttcatccttaaccacaactagattcatcacatctgtttgattcatcccacaaggtgcagtttgaaaagcgacaatcaagttcttaagatcatcatctgaaatactttctttactaaaatctctaactgctcttcgattagtaaaaattgaatttaccatatatgcctccgcatttactttacatacgcgtggtgctagttaaatcgttttagttaataaaaaagtccaattagactagactcaagttgtaagtaatttaaatagaaaagagtctgatctaattgaactatctcaagcttaatcgtttttctcaccatttacaagttagttttaatcggttaaatgtgatttgtcgctcgctgtataagctttatgcgcctgatggacttaaacatcgtaaaaatgttgatcagaccaagcttcctgatagttctatcttagcgatgctcatttggcaaactgaaattggaattgaatctcaacgaagattctgtaaattcttcgttggcttatctcattctcgttttaaccgtcgagctcgaatgctcttgcctctaattcgttgtatccgtcagggttggaatcaggaagtaaaggtaggtggagaattattgattatcgacagttttccgattccagtttgtcagcctgttcgcaattatcacgttaagatcttccgtggcatagccgatattggttataaagcgacgaaaaaaatctactattatggcttcaaagtccacgcaatagtgagtgatgatggctatctgcttgactacgcagttactaaggcgtcggtacatgatgcaaaagagacggtagaattgatgatcaatgctcatccaattaaccattatcttttaggagatgaaggctatttaggaaaagacttagcagccaagctaaagcgtatgggatacgtgctttggacaccatatcgtaaaaacatgaggggtgctaaaaagcataatgatcatcagttaatggcaattagaagaacaatcgaaagcgacttttctttgcttagctattacaatgctgagaataatcgagccaggagcttagtaggttttcaacaacggctagaaatagctattttagcttataatatggcatattgtctagaacgatttaactagcaccacgcgtattattgagaaaaaatatacaagaaaactacctgaacaatttgaactggcccaaaaatatcaaactagtcgggtcacaatcgttcacgccttaaagattttacaaaataaaaaattaatacggactgtcaagggacatgggacctttattacaagcaagtctattcccgacatttttcttaattctgatgtcaatgagcataccggctttactcgtcatgtcaataatgctctcgcaataaccagtaatgtgattgcctttaacattcgcaaacctagtattagtgaacgaaaagctctttgtttagaaaaagatgacgaagtttacgatattattagacaacgaattttaaataagaagccagctaaactagaatataccgtgatgcctgttagccgcatccccggtatcaccctagatattttgcacaagtcaatctactcttatattcaaaatgatcttgggcttaagatcggccgagcagatcgcattattacagctgaaaaatctgatgcatatgatatgaagtatcttgaatgtaaaaatgatgatcctgttttatgtattcagcaaaaggcattccttgaagacggacgaccttttgaaatttctgagtcacgtaatcgctatgaccgtggtgatttaacagttaatggcaaataagtgttacttgattaaaaaaatcaattatggcaaaatggctctcgtaagcgtttccaattacatacaagaaagtgaggaaaaatttaatgtattcagcaaaaatgcctaaaaactttttatggggtggtgcagttgctgcccaccaacttgaaggtgcttggaaagaaggaggaaaaggtacttctgttgctgatgtaatgaccgttggttcagctactaggccacgtgaaattactgacggtgttcttgaaggcaaaaattatcctaatcactcagccattgatttttatcatcactacaaagaagatattaaattaatggctgaaatgggcttcaaggcttttagaacttcaattgcctggacaagaatctttcctaatggtgatgaagccgaacctaacgaggagggtttaaagttctatgacgacttattcgatacttgtcatgaatacggcattgaacccgttattaccctctcccactttgaaatgccttttaatttagctaaaaactatggtggttttaccaaccgaaaagtaatcgatttcttcgttcgttttgcagaagtttgcttcaaacgctacaagaataaagttaagtactggatgacctttaacgaaattgataatcagtctgcattcaataatgatttcttgatggctactaactcaggcattttgttcaaagatggcatgactgacagagataaagaagccgccatgtatcaagcaggtcactatgaattggttgcttcagccttagctgttaagattggtcacaagattaatcctgatttccaaatcggttgtatgattaactactcacctgtacgtccgctcactccatcaagtgatgatgtccttttagctgataaatgggagcaacgccgtgactggttctcagatgtacatgtttttggtgaatatccaaatgcagttgaagcctacattgaacgaaatggctatcgtcctgatataactgatgaagataaaattgtcctaaaggaaggcaccgttgactacgttggcttctcctactatcagactactaccgtttctagcgaaaaagttaaacctgatgaattaactgatttggctaaagctgttgctaagaatccaaccttaaagcgtagcgattggggctgggaaattgacccagaaggcttaagaattgcattaaatcaattgcaagaccgttaccacaaaccattattcatcgttgaaaatggtcttggagcttacgataaagttgaaactgatgggtcaattcacgatgactacagaattgactacttaagaaaccatatttcagaaatggaaaaggcagttgaactcgatggagttaacttaatgggctacttaccatggggctgtattgaccttgtttctgcaggtactggtcaaatagataagcgctacggctttatctacgttgataaaaacgatgctggtgaaggtacattggctcgttcacgtaaggactcattcttctggtacaagaaagttatcgaatctaacggtcaagacttagattaattaaactattaatagcaaaaaactgatattcagactttaatcattgaatatcagttttttattttataaatatttactgccttctttaatactcatttagctaaatgctctcgatgcagttcaatgaagttacgcacccaatctggattggtcttagagtaatcacgcaaagcccagccaattgccttattgataaaaaactcctgactatcaagattattttcaataattttttgtaataacgcggtgttcatcttctttttacgcaataattgatgctcaatcgcgacccttcttacccagaaatctggatcgtgcgaccacttgagcattagatcgtctactcgattatccgttaagccaacatagccataaattttgattaatgagtcaatcgtatcccaccattgctttgttctaacaaaacgctcaattttagctaaatcatcaaaaacaatatactttttcattgccaataaataatcacaggcaaaatattgcaattcgcgttgttcttcatcccatgcctggtctagcaacttccagtcaacttcttttttcttcttttcatctttcaaaaaattatgataaatcgccctacgttctggtgtttgtaggccatagaatagaaattgatttcgcatgtaaccaacaagatgattggccttttcttcatttgctcgagcgctaaattctttttttaatgtttcaatattcatgttttttattttagcacaaaaagaggtcccaaattctagagacgcttatcgtaaaaataatcatctacccgatcatttcaactaaaagcttggtagaataaaagtatctatattaagaaaggcataaacaatgaaacaaatttattttaaccatgatggtaatatcgatgatttagtatcttatctgctcttactacaagcaccagatatcaaacttttaggtgttggtgcaattgatgcagacggctacattgatcctagtgttgaagcatgtcgcaaaatgaccgatctttttaacttacgtggtgatgatttgactattgctcgttccaactcacgtgcagtcaaccaatttcctcacgagtggcggatggcaacttattcatttaattatcttcccatgctcaatgaaagtggcaagattgatacgcagcaggcaaagcttcctgctcatttagacatggtcgaaaaaattaaagaagcagacgagcctatcgctttagttatgacaggtccgttaactgacctggctcgcgctttagatgtcgatcccgacattgagaaaaacattgaaaaactttattggatgggtggttctcttgatgggcacggcaacgttgctatggttaacgctgacggtagtcaagaatggaactcgttttgggatccatacgcagttaaacgcgtatttgaatcaaatattccaattcagatggtcggattagaaagtacggaagaattaccacttaacgatgagttgcgccagcactgggcaagtttacgcaaatatcctgcaatggacttgataggacaaggctatagtctaatcgtatctataccatcagccgaactctacctttgggatgtgctaactacaatcagcgcactatatccagaagttgttgaaaccgaaacggctaaagcaagagtcatcactgatgggttaagtgcaggaagctttgtacgggatcctaaaggaagagaagtaactcttgttactaaagccaataaggatctcttcttccaaaagatggatgaaattttagaaagaaaataacaaaaaaagaggctcacgcctcttttttatattgccttaattgactttttgtaaagaattaccgcaatccaaactgaaatgaatgatggcagtatcgcaactacaaacaaatttggatctaaaaaattacctactctgatgaagtttgtaattgaagtaatatgttttatgttactaaatatcgcttgataaactgtaacatatattaacgaccactgaatataatattctaccaaagtgagtgtagttgtcgaaaacttaaaaattttgctagccagtcgcatcccccaataaacaaaaacacctgaaagtacaacaaatgctgctaacagcaaaaacaagtttcccaaattaacatggtcccattgactcatgatcaaatacgcaattaccatgaaaattaagaaattaattgttgaacaacacagctgaatgacaaataaaattgcagcctttaagaattcaaacttgtgctctgatctgaataacaaaaatactactagaataattgcagcaacgatgaaatatgtattaacgtgcacagttatctcctactttgcctgttttaaggcttcgcttgtagcctctttaaccccattggaagtaaatgttgcaccagtaacagcgtcgatatcagcagattgtttatccaaaatttcctgctttaatgttttttctgctttttgaccatactgcggcgtttccgtagataaatctaaatctacagttgaaattttattatcagctacagttaatgtcacacctacaaagcctgccatgccgcgtgcacgggcactatatgttccttcttttaacatcctttttcctcttttttataaaacaaaacattctaagctaaatagtgaattagttatccgacgggataattgattcactatttttattcttttgtagaattaaagtagtagtaaaacgatatgccctgaggtctttagacacttgatgtcgcataataaactggcagttttacttaagttttcaatagtctcttcgaagaatgtggacactagatgtcgagtttagaaaattagatctgatttcttaagtaaatacgttttactactaagttttggaggtttttattatgcaagttacttttggaattgatgtaagcaagtctacttctactgtttgtgaactaattggtgaaagcaaaaatgaactaaccattactaataatcgtcctggttttattcaattgcttcatgaattaaccgctttttctaaacatccgcaaattatttttgaagctaccggtgtttattcacgtacactgcaatcttttctggaagactatggctatgattatgtaattcttaatcctcttaaagctaaaaaagaaatggatatgggactacgtcataataagactgataaaactgatgcttatcatttggccttaattcaaagactatatcatcatccaattaatcaacttcaatctcaaacttataagcagcttaatgctttgagccgcttctatgaccagttaacagctgacttagtaatggctaaaaatcgacttcaccaagctctacaatcgactttccctgaaattgaaaatctattttcttctgctaaaggtaaaaattactggcaaatagttgtgcgatatcctcattgtgacttagtaagaagagaagataaaaaacagcttattaactggttaatgagcttaaaggggattgcttttaaacacgctctaaggactgcagataaattaattgaattagcttatcaagcttatccagttgtatcttgctctagcatagaagtcgagcaagtgcagtattatgcacacagattgcttaatttaagtgatcaaagagaaaatttaatcgcaagaatggttaagttagcgaagtctttgcctaatcatgatttagaaaacctagaaagcattccaggctttgcacagaccactgctgtcagagttttagcagagttaggagatttacgcagatttagtaatcctaataaaatcaatgcttttatcggaattgatccaggcagatatcagtcaggagaaatggactctaatttaagtattactaaacatggcaatgcagtcgcacgtaagttgctttatcgagctattggacaaattgataatgcagctaagacaaatccgtgtcatatagcagattattatgaaagcaaaaagctatcctctcaaaccaaagggttcaaaaagatagctattgcttcaattcataaactaatcagaaccatttatgctctgattatcaatgatcaactatatgattacaacgtagccacacataaccaaaaagactttagttgtaattaattgatcaagtacattataacgctaagcccataaattaaatatagaggtgggcttatttagtatgctttctaaaaaaataaatcgccactaaaagatactcatgacaaaatttaggtaaaaaataaagccaaacaccttattgcgcttgactttacgtagaaaaatactgctatataataaatataacagtattcctaaaaaaagccacaaagatattgtgtttagtatatcatattgatatactatctcttgggtcttgattgtttttataagcccttattatgacccaagtgcaggtagtagaatccccttctacctgttttattataccacaataaataactgatgttatataaaatcttaagttcttttgaaaattttctcaaaagggcttttttcttgcactatcctttctaagttacgttaaaattgaaatggaattataaagttatatttaaagaaggtaaagcatgtatccagataataatattcttacatatttaaaatggcgtggtgacgttgacttctcaacatcgccttttaatgatattgatgcacttgttttatctattttttcttatcttgaattaccaggtattgttaaaagtaacggaacgacaattagtttagagaaggctgccaagctctattttgcagatgatcatcctcgttatgataatttgcaataccaagaactatttaaattaatggctcatgcagaccgctttaaaaatgcaaaactgtcgtattttattagtaccttaactgaacatactcaatttagtgcaatcaaaattgaactaactgatgggaccaactttattgcttttcgtgggactgacgattcactaattggctggaaagaagattttgaaattagttttaaaatcactgtagcccaacaacaagcagtaaaattgctcgaaactattctcaaagctgatgatcaagattattacttaggcggtcactcaaaaggtggcaatttagctgaatatgctgccattaatattgagcccaaattaagaaaaagaatcaaacgtatttatacctttgattcacctggaattgcagaagaagttggtgctcagctccctaataagtatttgcaaaatactctacgccgctttgtgccagactttagcgtcatcggtcgcttgtttgagtcgaaaaatattccagccactattgttggtagtactcgcaagggactaagccaacacgatgctttttcctggcaaataatcggttctaacttcgacaccagacgccaccgcaatgctcaatctcaagtatataatcaactaatcaatcaatggattggtaacgccaccctagaagaacgtgagtctttaactaatgacctcttctctgctttaagctctagcggcgcaactaagatcaacgaacttgataaaaatggttttggcggttttggtgcaattttgttttcactggctgattcatctcggcgaacccgtttcgtctttggttcattattttccagcatttggcagacgatcaagagccagcaactgaccaaagcgcttttctcaacagacacaattgttggttgggtgctggtagtattcggaatcattagtctaactctaccccaatatgcagtgcgagcttttggcgccctagttgccttcacggggattggtttcagtgttcaccaaattttaacaacggcaaaatctagtctaaaagaccgacaaaaaaacttctttattatttcgtatttagtagtttttgctttatcaaccgcgttaatttctaataaccgtctactaattttcttagctcactacttcttaggactattcttaattatctattcctacattcgaattaggcaactagtctttcgtaaattacccggaatttttcagattactattgtagcgatcgaggcattaattgcttttgctttaggaattatcgtagtggttaaccctagtgcctttaatcggagagcaattattattatcggtattttgctaattgcttacggcttcttcaagttagttggcgaattatttggccagcgcagcaaaatgcccaaaaatcatcgttaaaaaaagcttgttaacttcaatatcagttaacaagcttttttcttagcccttaataaaggtattagcctttatatgctttaaaatgttatacccgattgcacgaatatgatttttactaccataagtttgattcaaaaacattacaattccattctgattatcagtagtcagttgcatccagttaacaaagtgggtatcaccaaaattgccataagcgacttttaaagtttgattctttttcagataaaaaccacctgagtaagtattaaccttagaacttaaatgaccaagataatggaactgttttttagtcagaatcttgccattttgcataccagattggattttataataatcattagccgttgaaaatagattcccagcaccaggcaattgagaaacaacattacgattagcataggtactagcattgtaatttttaccaccagaataaagatatgaaatcgcatcagtctttgaccgcggaatttgttgataaatataggtttgcttcaacttcaatgatcgaataacccgctgtttcacattagcagcataagactttcccgttactttactgataatgcctgccagcaaaacatagttagcattattgtaattaaatttactgcgtcccgtattttctcgtgcattggcttgggcaattgtccaattgatcgcgccattttcagaaaaattaactccatgattagattctgttccaattacgttaattcctgaggtatgtgtcattaactgccccaccgtaatttggtttgcatgcttcaaatttggataccagcgtgaaatcttagtattctgattgaatttcttctggtagattaactgtgtaattattgcagcagtaaccatcttttgcaaagaaccaactggataaagcaattttgtattgccatttttcagtcgtttgctgtaataaccgtagcctaagctaacacgttgagcatgcccattttttacaatttcaatgcttcctcgtaaatgatgctttttcatcatcttaagcgtatattgccgtagttgcttatttgaataactcttcgcctgcacagcatgatttgacattatcaaacacgatgaacaaaataaaatgaaagctatcccgaacttttttagtgtcttcaaaatttcaatctccttttaatcctgaactattctaccacaatcaaaaagcgcaaaatcacttttaatcatggtttgcgctttcatttttatttttttaaatttttatagtaagttcatcttaactaggtattccgcattttcaaccgtattccatgcagcacccttaagcaaattatcggctacaatccacatgttgaaggcacccttattttcataatcagggcgaatgcggccaacaaaagtttctcgcttacctgttgcattaattggttgcggataaatttgatgtttaatatcatcttccaaaacattacctggaaaggcagcaactgcatctttaatatcttgtgccgttgcagtctcatcttcaacagtaaagtagacactttccccatgagaaattgacacaggaaccctaacacaagttgcagttaccttgatatctttggcattcatgtcatttagcatgatcttctttgtttcatgaatcatcttccattcttcatgagaatagccactatcttctaaaacatcaatttgaggtaacaaattaaaggctaatgggtaatgctttttgtctcctttagtaggtaaaatatgagcatctgcttgcatgtctttaccatcaaggtaatcttgactttccttttttaattcatcaattgctgcttgccctgctcctgaagcagcttgataagtggaaacgataatttgtttcaaaccaaattttcttcgaactggttccaaagccattaccatttgaattgttgaacaatttggattggcaatgatgccgtgatgctttttcaatgcttctggattaacttcaggtacaaccagtggtacatctggttccattctaaatgctgatgtattatcaacacagacagcaccacgcttaacggcttccggcagaaacttctttgacactgcaccaccagctgaggaaagtactaaatctacaccatcaaatgatcctggtgtagtttcttcaactgtcaaatcttgatccttaaattttaaaactgtacctgctgaacgtgaggatgcgagtagctttaagcttttaactggaatcgttgattgttccaattgttcgatcattcttcttcccacggcaccagtagcacctagaattgcaacattatattctttcaccattatttttttcctcgcaaaaaattcttcattctttccatcgcttcatgtagattttcatcactggaagcatatgacattctaacgtacccttctccaccaggaccaaaagcactacctggagtaataccgacttttgcttcaaatgctaaatccagtgcaaattgcatatcatttttaccatatttagctggaatcttagcgaaaatataaaatgctccctgtggtttaactgcttgcatccccatcttagctaattcatccaacacaaaatcgcgccttctttgatatattttgcggtatttttctggatcatccaatccatgctccaaagcttcagtcgctgcagcttgagaagagtcagttgtagtcgtaaccattaaaccatggactttaccaatttgttccataatttttgccggaccagctacataacccagtcggtatcctgtcattgcatgtgacttagataatccagaaatataaattgcccgttcaggaatcacacttgcaattgaaaaatgcttaacgccataagttaaagtactgtaaatttcatcagtaattacgtacagattgtgtgcttttatcacttcagctaatgccctaatttcgctttcggtgtattcaactcctgtcggattaactgggtagtttaagataaccgccttgatattagattcttccttaagtgtactttctaatctttctggcgttaatttaaagttatcttctgacgtgttcattaatacataatctgcatctgctaaagttgcaactggccaatatagtgaaaataccggtgtaggaatagcaaccttatcaccccgattggtaattgaaaatagtgtcgcattaattgcttcagttgcgccaactgtaaccacaatttcagtttctggatcgtaaactactccacttgcttttttcaaataattgctaattgcttgcctaagttccaattttcccttttgtggcgcatagtgtgaatcattatttcgaatactttcaattgcagctgttttaacatgctcaggtgtattcatatcaggctcacccaaagtcagcttgataattccaggaatggttgaaactttattatcaaaaatcctaatccccgaagccttaacagattgaatcttcttacttaaagctaagtcatttgctaattctggcataatttttcctcttataaaatattctctaagccaataactagttcagttaattgatctactttttctaaagcaactttaaccccactcataaaggaatcacgatcaaatgaatcctgtctaatggttaaagcttcgccaggtccaccaaataaaacttgctcatgtgcaatatagccaggtaagcgtactgaatggattttaattccttgataatctccaccgcgaacattggctaaagtctcagtttcatcaggcgcagtttgatgttcaggacgattttgcgcgatcatttttgcagtagctaaagcagtgcctgaaggtgcatcttttttatctgcatgatgcatttcaataatttcaacatcagggaaatacttagcagcttcttcagcaaacttcattaataaaactgccgacattccaaaattaggtgcgattaagccacctaatttttcctttttggctagttcaatcaaagttgcttcttgatcatcactcaagccagtagttcccacaataggtttaatttgatgcgttaaagcaaaataaacattgtcatagacagctgcgggagtagtaaaatcaatccaaatatctgcagcatggtcaggaatttgacttaattggttaaaaatttgggctgttttaggtaaatgatatctttcaggctcatttactgcctttggagcaaatccagccaccaattcaaaattgggcagctgattaactaaactaacagccttttgccccattgcgccagtaaacccagctattagtacttttttaggcatctcgtcttaccaatcctttcctaaattaagtggcaacttttgcatcaatgcattagcatttaaacctaaatgctgggccaacttttctttttcctcatcacctaaagcgactaatggcaaacgacatccccctactataaatccttgagcattcaaggctgccttaacaggagctggtgaaggatacataaacaaagcctgcattttcggcgttaaccagcgttgaatcgtgcccgcttcaggataatttccttcataaagatcatcaaacattcgccgcatttgtttgcaatataaatggctagctacggaaataacgccattggctcctagtaatcttgcaggtaacgcttgcgtatcttcaccactaaataccaaaaaattaggatctttatgatcaataatgtattccatttcttctaaagatgcacattgtttgattcccttaatatttttaaggcgtgataattggactaccgtttctttttccatttttacgccagttctaccgggaatgttataaatcataattggcattttagtctgagcattaacagcactaaaatgtgcaatcatgctacgctgatcaggcttattgtacggtggcactactactaaggcataatcaattcctttaatctgtgctacctcattggtgaaggcgatagtggttgcagtgtcgttactgcccgttcctgcaataaccggaacacgtccattaacaatttgaccaaaatgctggtacaagtctatcttttcatcatgagtcagagttggcgtttctccggtcgtaccaccaactacaaagccattgcaaccttggtcaattaaataattaaccagcttttctaaactggcaaaatctattttttgattctcatcaaatggcgtaacaatcgccgttaacaaatctgcatcaattaatgttgccattttattgcctcattctattaatcaaaaatcctttgattgcatcaacgccgcgctgaatgcttttctcatcaggattaagtgtagccgtatgcaattgtgaatcaggattaccaacacctagccaaaacattgttccagggaatttagtcagcaaaaagccaaaatcttcacccgtcatttttggttcagtagtaataaagttaaccgtcggctggcttttcatatatgaaataaagttcttggttaattgtgggttattttctactggccaatatccaccttgattcaagtctaacttcacttctacaccaaagcttttctcaataccaagacagatttctttgagacgttgatcgattgtcaaaatcatattttgagttaagccacgaatcgtgccctcaattctagcttgaccagcaattacatttctaatcgtaccagcttcgattttgcctagagtaataacaccactttgaattggatctatgcttcgtgaaataatagtttgaacctgcatgatcaaacttgctgctgcaactaccgtatcatttgcatcttgcggaaaagctgcgtgtccacttttacctagaatatcaatattgacttcagttgtaccagcaaaaagtgtacccatccgacacccaatgctaccagcaggcaaagcggggttatcatgcaagccatagaactcgtcaggtttaaattgatcatgaaaaattcttttttcataagcttgcatcccaccactttggctttcctcggctggctgaaagaaaaaaagcaaattatcttgtggctgattttcactaaaatagcttaacaaacctaatgccacggtcatatgaatatcatgtccacatgcatgcattactccctcatgttttgatgaaaatgccagtccagttttttcagtaactggtaaagcatcgatatcagcacgatatcctatcgttctgtgtggttttcttcctttaactaatactagaattgcggtaggcagtgtcgacggtatctcaacttccaaataatcttgcttaaatttttgaattacctcgattaaataatcatgtgtttctttttctgctagtgctaattcaggtatttgatgtaaatgccttctaatttgaattaactcactttcacttaaaactgacattttataactttctcagattatcttctagttccgtcttactactagttttttcatcaacttttttaataattttagcaggaacgcccgctaccatcgtatgtgctggcacatcatgagtaactactgctccggctgcaataacggctccttcacctacatgaacaccctcaatcacaacagcattagccccaatcatgacattatcatcaatttgaaccggtttagctgaagcaggctcaattacaccagccaatacgctaccagctccaatatgacaatgttgtccaacaatggcacggccaccgagaactacgcccatatcaatcatggtattagccccgatttctgctccaatattaataatggcacccatcataattactgcattattaccgattaccacttgatcacgaataatagctcctggttcaattcgagcattaacttttttgaagtccaataaaggaactgctgaatttcgtgcatcattttcaatatggtaggccgtaatttgatgattttcttttaaaaatggttcaatatctttccagtcaccaaagatcgcgccagaatgagcttcagtaaaattctcaatttcctttggaaaatcaatttgtgctaaatctcctttaataaagacttttaccggtgtcttttttggtgcattaccaatgtaatcaataatactttttgcatctaactttgccatcttttttctcttttctaatttaaatatgattgatctaaatgaaccaagtcttctaaactttcacgcttaatgactaattttgctttaccattttctgcaaataccactgctggtcgaggattacgattataatttgaagccattgaatacccatatgcacctgtatccaacatcgctaacaagtctccagctttgacttgtggcaaagcttgatcttctgctaatatatcgccactctcgcaatacttaccagcaatacgaacatgttcagtcaaaggcgcttgtggatcggtggctaaaactgtttcatacttagcctgataaagtgcagggcgaatattatctcccatcccgccatcgacagtaatataagaacgataacctggaatatccttacggctacccaccgtataaaggttgtaaccggctggaccaacaattgatcttcccggttcaatatcgatttcaggtaaaggataattcattttttcagcttcagttttgatcaccttaacaatcgtcttaacaaattcttctggtcgtaatggatgatcttcttgggtatatttaatcccaaaaccgccaccaacattaataacttgtgcaagatagccatacttttctcgccaatcttgcgctactaccattaatttttgtgctcccatttcaaagccgtttaaggcaaaaatctgtgagccaatgtgagcatgaatccccaacattttcatcctaggattagctagaacttgttttaatgccttttctgcttgacctgattcaagatcaaagccaaatttactatcaatctgacctgtttgatcatattcatgggtatgtgctgaaatccctggtgcaatacgcaacatgacactaatcgtagcatcgtacttttttaaaacttgcgccaataactgaatctcatgaaaattatcaataataattttgccaacatgattttttacagccatttccaattcagttaatgatttattattaccatgaaagctaactctctccattggaaaattggcttttattgcagtaaataactcacctgctgaaactacgtcagtgtatgctccctcttctgcaataacttgatacattgcgattgctgcgaaagctttacttgcataactaacagcataggccatgttttcttcttcaaaaactttcttaaaagcccgaatttgtcgacgaatttgatcgacatcataaactactaatggcgtaccatacttttgagctaattctactatatcaactccaccaatcgttaaatggccttgctcattaatctgatctactgcaatttgtgaattcattttgttctcctgtctttttcaggcgaaacgctaataaaaaatccattgtctgcgccaaacaaacaatggattaatttctacttaatctatggtcgatagcgctccgcgaattttgttcgcgacagtccgcagtttattcaactacgccccagctcaagcctttagcatgactcagcttcggcaacctccccttttacaattcatcttcgttttgcccaactcagaattgttacttatgtcggctgcgcctcttcgattgactgtagtttacaattttataaaaacatagtcaacaaatttattataaaaatttaattttatttgtaacaatgcggcatttagagtgataaattacagtcatcacttgcaagattaaaaaataatgttagaattcaattaaatttagtctgacttttttatttaaattaatgatttctgaaaacaaaaggagttttgaaatgaaaatcgtaaagtttggtggctcttctttagctaccggtgaaagtgttgcacaagcaattcaaattattctcagcgatcctcaacgacaagtaatggttgtctctgccccaggcaaaaggaatacaacagatatcaaagttactgatctgttaatcaagtacgcagatttagccttaaagcacaagaattgtgttgaaatcgtgaataaaatttttagtcgctatcaagaaatttgtcattattttggcttagctgatacggaattaagtattattaaacaaattttattagagttgcccaatcagggttatcctaacgaaaaatatcttttagctgcatttaaggcacatggtgaacggcttaatgctcgtttaattactttaattttacgccatcaaggaattaatagtcgttttcttgatccggctgaagccggtttaatcgtgactggcgagcccaatgatgccattgtcaatccagagagctacttaaatcttgaccaaattaaaattaaggctgatgaacgtatcgtatttcctggcttttttggcatgactccgtctggtaatatcgccactttttcccgtggcgggtcagacattaccggggctattctagctcgcggctttcatgctgatctctatgaaaattttacagatgtcaatgggatttttgccgctaatcctcatattattgagcatccccaatccatcaagaaaatgacttatcgcgaaatgcgagagttgtcatatgctggcttttctgtttttcacgatgaagcattgattcctgctattcaaggacagattcctatcaatgtgaaaaatactcatgatcctagcaatcctggcactatgattgtcccagaaaaggattttgtcccagataatgcaataaccggcgtaaccagccaaaaacatttttccgcattatatttgcataaatatttgctcaataaagaagctggtttcaccttacgtatattacaaattttataccaacataatattccatatgagcatatgccatctgggattgacgatattaccattatttttaacaatgattttctaaacgatcagttaattgatcaaatttgtaatgaaattcaagctacaattaatccagatcaactcgaatggattgaagattatgcaattattatggttgtcggcgaaggaatgcgacaaaaacataccatcagccgtcaaattatcgattctttaggcgatcatgatatttcaccacaaatgatcaatcagggagcttctcaaatttcaatcatgatcggtactaaaaaagaaaaggctgatgaagcagtaaaaattatttatcaaaagttttttaattagggggcattatgattaatttattcaaagttcacggttcgcaaaatcatttctttattcttgatcaaacacaattcgaacacgaattaagtgacgccgagctaaaaaattttacgcaaaagattaccaatccacaaactggactgcttcacggagcagatggcgttttagtagttaatcatcccgtgcattctaactcacttggccagatgcgtgtaatcaatgctgatggaagtgaagcatcaatgtgtggcaacggtctacgcaccgttgctcgttacctaagtgaaaaaacgggaaaagataatttcctagttgacacaatgaatgccagcttacgtgttagaagagaaaaagattttgcttctaacgtgccagcatttgcagttgagatctctcctgtacgctttaataaagaggcactcccttttgataatttaggacaagaacggattattgatgcttggttgccagaaatttatcctggattacgttttacttcaattgccgtacctaacccacatttaatttcttttgttaatcaagcagaaattaccggcccgatcttaggcattgttggtaaaaaattaaatagcaataatccctactttacagatggcgtcaatgttaatttcgcgcaaattttagataaaaataaactttttgtccgcacttacgaacggggcgttggttttaccaatgcctgtggtactggaatgtccgcgacttctcttgctcttactttaacccaccccgaaataggcaacttaaatacaccaatatcagtttataatcctggcggtatggttaaaactatcgtgcattatgaaaaaaatagttattggatcgagcttattggtaacgctacttttactcatcgaattaagctttctgaagctgacttaaggaaaggtgatttttccaatgtccagatccaaaagactgctgaacaaagtgcttatgaaaaatttattgctaatctgccaaagttcaatgacattacaactttagcgtaaaaaaatggcttgcaacacgcaagccatttttactttttaattattaatctaagtctttcaagccatgctttttcttggaaacgcgataagctactaaaccaaagaaaattggaccaaagcttgtccaaaaagcagttgcatatctatgctccaaaactggttgcaaaaccgtaaatataattccggtgcaaacaatcagctcaacaaagactactaacgcaaccgtccatttatagttagtaaacactctaaacttgcgcggataatcttttttaagaaagaatggaaatgcaccgatcaagaaaatataaggtgcagtagcggctacgttacccatatccgtcagaatttgataaaagctagtcgctgcgctaccaccgaatgagaccaccgcaattaataggcaaacgaagacagtttgagcccacatcgcattagcaggaataccgtgtttatttaatttagtcgctgccttaggccataaacgtggatcagatcccatgatgaaggatttaattggtgaataaagcaaaacaaagagagcacctgtcattcccatcaaaccagataaagcaattgctctagtaaagaatttaccaatcaataaactcgtgttaggatccaaatgaagtgcggttccaaaggctttgccaagtgtgccatatacggtatacgtaatatttccagtattggcattggctgctaaaatatctttttgataattaactgaaaagccggtcataaaaatcatcaaaacataagaaataatagtgaacaatgacccaataattaagcctttagggaaatctttttctgggtgtttcatactgtcaatcacaccaccgacggtttccatcccaccatatgcaaagactgcataaactacgaaagaaataatcgtaattggcgtttgaaaacttttattaggcgaaataataaaactttgccacccagtaatcggctgagccaattgcccatgattcataatcaagaccgttaaactagctagaataaagactgcattcattacaatcatgaaccaaccaccgattgatgacataattttaattccagttatccctctggaagacaggtacgttgatacaatcatgaataaaattgctagtacacctatcaattgagtaccatgcaagcccaaaatattccattcttgagttgtatctttgccaaaaataagggcagagattgaaatccaaagccttgaggcgcttgcaaccagccacagcacccagttagccagccatacaaaagtcccaataaaggcctatttttgtccaactgagccagctaaccatgaataaataccaccttgagcatcatgaaaagcagacccatattctgccatcattaagccagctgggaaaaagaaacagacgccagccaaaataaaccaaatgatcccagcatatgtcatttgctcataagaaacagaaacattgccaaaaccataaaccgttgtgataatcatcaacacaaggctcatagtcgtcaatgattttttagtttgtgaattttcatcatccaagataaagcctctactttctatttacactttccattttagcatcgtttatcttgaataaatttattctaattttaggctcataagaaaaaactactagttattcactagtagcccttcatttttattcattaattcttttttcaatccaattacttaattcagttacatgtaatttagtgaccgaactaaaagtcaaaacggtgacatgatcatagttgagattcaactttttctttaagcctgacatcaccttattagtttgactcttttttattttatccatcttggtacaaactaccaaaattgggatatttagatattgagcataatcatacatagcaatatcatctttggttggttcatgacgactatctactaagataattagtccctttaggttgggtctagtttctaaataatcttgaatcatttcgccaaattcttgccgcttcttctgtgaaactttggcatagccataacctggtacatcaaccaaataaaatttttcattgactttgtagaaattcaaagtttgtgtctttccaggctgtgacgaggtcctagctaagtttttacgctttaatagggtatttatcaagctggactttcccacgtttgagcggcctgctaatgcgatctcaggcaagttatctttaggatattgatcttctctaacagcactaactgcataactactgctttcaatgatcattgacacttacctgttctttattatcagtatttttgcggattacctttggcttagcgtgcttagtaattacgtccttagttacttcaacggtctcaatatcctcttcactaggagtttcatacataatatccataattgaattttcgataattgttctaagtccacgtgcacccatatttctttggattgctaagtcagcaattgccttcagagcaccatcagtaaacttcaaattaacatcatcaagtgataacaacttcttatactgcttaactaaagcattctttggttcagttagcactctgaccaaatccttactactcaatttatcaagcgtagtaataattggaattctaccaatgaattcaggaatcattccaaatttaactaagtcagctgtagtcaaatggcgtgtccaatcatctgcattaattttatctgcctcattttcagcaccaaagccaatggtctttttacctaaacgatttttaacgatttgttcaattccgtcgaatgccccaccaacaataaatagaatgttagtcgtgtccatcttaatcatttcttgttgagggtgtttacgcccaccttgaggtggaacagaggcaattgtaccttccaagatctttaataatgattgctgtacaccttcacctgaaacatcacgcgtaattgagacattctcagattttttagaaattttatcaatttcatcaatataaataatgccacgctgtgcacgttccaaatcataatcagcattttgtagtaacttaagcaaaatattttcaacgtcttcaccaacataccctgcttcagtcaaggtagttgcatcggcaattgcaaatgggacatttaaaatacgagccaaagtctgagcaagatatgtcttacctgatccagttggtccgatcattgcaatatttgatttttgtaattcagttgaagaatcaacatccatttggctaattctcttatagtgattatatacagcaactgataagacttttttagcacggtcttgaccaataacatattgatcaagttccttttttatttcaacaggcttaggtaattcacgagctgctttaagtgaatctgctcgtaattcatcgtcaataatttttttagccaagtcaacacattcattacaaatatatacaccgttaccggcaatcattttcttaacttggtcttgagttttgccacaaaaagcgcatttaatctcttcttgatctgtaaactgatttgccattatttttcctcctatatctaccaaaaatcagattatcataaattaactaatattgataaatattaagctcgaacagcaaaaaaagcggcctatagccgctctttttgagaaattagcaaatattactattacttgctttccttcttgtcatcgtcttctttgttttcaagctttgacttagcaacttgcttagcattatcagtaataagatccatagccttacgtacagtaatgtcgtggcctaacatgtcatctgataaggtgttacgtaccatcttttcatccatgttgtattctgaagcaagatccttgatttctttatcaatttcttccttagttgccttaaggtcttcagcagcaacaatagcttcaagaactaagttagttttaactctttcagctgcattcttttcaaattgtgaacgcaattgttgttcgttggtattagtcaacttgtagtaagtttgtgggtcaataccttgacgttgcatattacccaagtattggttcaattgagtatcaacatcttcttgaatcatagcatcaggaatttcatcgatagtagcgttgcttacagcaccttcaattgcagcttcttgaatagcgtcgtttgcttgttgttccttttgttccttcaagtccttcttgatcttttcctttaagtcatcaagggtgtctacagagtcatcaacgtccttagcaaattcatcgtctaacttaggaagttgctttgacttaacttcgtgaatcttagttgcaaagtgtgcttctttaccagctaaatcctttgcaccgtaatcttcagggaaagttacaactacatcaacatcatcgccggcttcatggccttcaagttgatcttcaaagccaggaataaatgcacctgaacctaattcaagtgagtagttttcagctgagccgccttcgaatggcttgtcgtcgatagtacccttgtaatcgatagtaacagtatcgcccttttcagccttacccttcttaagaacaagttctgcattttgttcacggcgcttgtcaagttcagcatcaatgtccttttggtaaacacgagtgttttgcttaagaacttcgatacccttgtagtcacctaacttaacttctggttctacagtaacagtagccttcatagtccaatccttgtccttatccattgatacaggaacaatttgtggttggccaactgctttaatacctgcttctttaacagcagcagaatatgcatttggtaatacaatatttaaggcatcttcatataatgcttcttcaccgtaatattgatcaaagatcacacgtgatacgtgaccctttctaaagccaggaacacgcaagtttttctttactcttctaaaagcttggtctaaacctaatttaatttcatcttgtgaaatatcaaaagtaagatcaccggttgtcttaccggtcttttcccatttaacagacattaattaaatacctccaatgtcaaatttgagtttgcatcttgcatactaagttatcttaccttaaaaggccgcaaaaaacaaatttaaaagaaacatactaacctagtgttggatcatgaatcgacggattcacgatctggcactttttattttgtctaaaatagaaagtgaagataaagcaaatcaagtcttcagctttttagacacttgatgtcgtaaaagaaacggactgctttaccacctattcttaagtctcttcgaagtctgtgggcacttagatgccgtgtttagaaaattagaattaataggttgataaagaggtttatcttcacagcggaggttatattatggaatcacaaattattttcggtattgatgttagcagtaaatcttccacagtttgtgtggttaatgaccggatcaaacaaggcgaatcttttagaatctctaatgattcctttggctatcaaaaactttatgagcaactgaaccaatatttgataactcctttagttgttttcgaagctactggtgtttattctctaagcctgcaagctttcttagaggattatcatattaagtatttgaagcttaatccgcttaaagcgaaaaagctaatggacaataatttacgccataataaaactgataaggtagatgcttatcgcctggctttaattcaatttaatgccccgcaaaagctgcgtgatccacagcccagagagtatcatgaacttcagaatgccagtcgctattatgaagaacttactaggagtatagttactactaaaaatcaattgcaccgcaacctccaatccactttcccacaaattgaagaaatactgtctcatccatctggcagaatttattgggcgcttgttagtcttttcccacatgctggatatgttctagaaaagaatgagacacaggtaactcaaatgcttaattctatttctggaataggacaacaaagggcacggtacttaaccacaagattatacgcttttgctagagaagcttatccttatgattccaaagatagtattatcgttagagctattcaaaggaacatttctaatttattttcactccagcaagaacgcgactatgtaattaactacatggaaaagctggctaaagcagtaaacgctcgtgctttatccatctatttgagtatcccaggggttgctagaattacagcagtgagattagtagcagagctcggtgatctaagacggtttagcacttcagctcaaattgatgcgtttgttggcattgatccaggaaggtaccaatctggtgaaaaagacagttctcttggcattaccaagcatggcaatcatattgccagaaaaatactttatcgagttattactcaaatggagacggtaaaggctacgcagccttgccatataactgattattatgacaagaaaaaacgatcttcaaatagacaaggctataagaaaatcgccattgcatcagtccataaactgatacgcacaatgtttgctcttatcaaacatgatcaattatatgattacaacatagccaccgaaaataaaagactttagctgaaatcaaataatcaacttaagtataagcaacctatggaaaaactacaagtattcataggcttatttgtggtactttcgctttttcttaaatttaaactcttatttgctttaaccttattcgcatcattaaaacaagtaaatttattttcttaaatcattgataatacttgactttgggtagaaaaaaagatgcgctcctgtgaagaagtgcatctttttttaactatatcgttagaaattagtcaaggatttcagtaacctgaccggcaccaacggtacgaccaccttcacggatggtgaacttagtacccttttcgatggcagctggcttgattaacttaacagtaaattcagtgttatcaccaggcataaccatttcagtaccttctggcaattcaatttcaccagtaatatcagtggtgtggaagtagaattgtggacggtagtctgagaagaatggggtgtgacggccgccttcttccttcttcaagatataaacttgacccttgaattccttgtgggtttgaattgagcctggagcagccaatacttgaccacgaacaacttggtcacggtcaataccacgaagcaatacaccaacgttatcgccggcttcacctaagtcaagagtcttgtggaacatttccaaaccagtaacaactgacttaagaaccttgtctaccaaaccaacgatttcaacttcgtcaccgaccttaacagtaccacggtcaatacgacctgaagcaacagtaccacgaccagtgatagtaaatacgtcttcaactggcattaagaatggcttgtcagtttgacgttctggagttgggatgtattcgtcaacgatgtccatcaacttaagaatttgttcttgagcttccttgtcgccttgtaaagccttcaaagctgaaccacgaacaactggaatatcgtcaccagggtaatcgtattcagtcaacaagtcacgaacttccatttcaactaagtcgatcaattctgggtcgtcaactaaatcacacttgtttaagaaaacaacgatgtagttaacaccaacttgacgagcaagcaaaatgtgttcacgagtttgtggcataggaccatcagttgcagcaacaactaagatagcaccatccatttgtgcagcaccggtaatcatgttcttgatgtagtcggcgtggcctggagcgtccatgtgagcgtagtgacgattttcagtttcgtattctacgtgggcggtattaatagtaataccacgttccttttcttctggtgcagcatcgatttgtgagtaatcttcagccttagccaaacccttgtcagccaaaacagtagtaatagccgcagttaaagtggtcttaccgtggtcaacgtgaccgatagtaccaatgtttacgtgtggcttagttctaacgtaatgttctttttctgccattaaaatgaccctcctgtaaatttgcaagaagtccgttgagataagttaacggataattctctgttgaatattgtactactttcttcggcaaatgcctagtaaaaaagcttaagcgaaattgcctaacgaaaatatcctttgctaattatactaaatagtttgaaaatgtaaaccttttttacttattttttattgcggtaagtatttatatattttttctagtaatttttgatgactacggccatcttttctttgtaaaaatgagactaaatcactagcaaaactgtcaggctcatcaatatattggttaattttagggtaaagactgcctaataccaaattcacttctcccagcattaatggcaactgacttggactattgtgaaatttgcttccaatgctagaaataatttcacggtacttaggttctttttctagaagcagtgtattcgccggaataaagctctccatctggcctattacccaaatttcaaacttttcttcaagtcccaagcgaactaagtcttcacaaagtgacaacctaacagcaaaatctggcgttggatctaataagacgcttcgtgcaaaagctttaaaattaggcaggtttaacttatgtaaactttcataatccgactgagtaacctgttctcgttgtttaaagttttgcataatctgccgctgtttttcttcagaagctggttttaccttttctgataagtccaccccaacaagattttttagttgtagagcttcaataaaaaaattatttttagctagaatttgacagtaacttttaaatactcgctgatcagaaaaaagatcaggctcctctttaattaaagcatatgcctgatcttcttgtttattagcgcaatagagtttgcagagtttcaaaataacgtccaatgaatgctcttcacgtaatgcttcttctagattttgaatagctgcttcgagatctcccttacgctcatcttcttcagcaagtttcaataaattttgttggcttactgatgtcatttttagtctttcttattactttcttttttcttatttatttttttattttcgtctttggcatggttcttattgtcattttgtgctttttcattgcgtttctgcatagcacgatgacggttttgatttacttccatgaccacgggcaagatcactggacgacggttagttttcttgtataaaaacttctccaaatcaccgcggatatcttgcttcaattcagtccaatcaaactttttgtgttcaaaattggcctgaattgcttttttaattacatcaattgaatcactcatcaactggcgattagccttgatatagacgaaaccacgactagtgacttttggctctgcaataatctttttcttcttacggtcaattgtaacaaccgcaataaagattccgtcatctgataggacctcacgatcacgtagcacaatattaccaacatcaccaacaccagaaccgtcgatcatggtatcttcacctggtactgggtcagttaagaagaaacgcttctgcttaaagtcatattcaagacagtcaccattcttggtaatataaatatctttaggattcattccagctttaatagccaaatcacgtactacttcaagtaaacgatattcaccaattactggaattaagaattttggcttcaaggttgtaatcaaaagttgcagatcacgaccagttgcatgcccactagtatgtatatttctgcctaactggataaccgtaccgccagccttatataccaaatcactggtttcagctaccatcgtttcaaccgcatgtgacggagtagttgcaataaagaccaaatcgcccttatgaatcgtaatcatactatgacgcttcttagccattttttgtaatgagttaagtggttcacccatacgcccagtctctaatataactgtctgctcatctggcacagtcttcagatccttaactcgcatcaacaagccttcaggcacatctaaatagcctaatttcattgaagttctaacaatcttagctagatcgcggccagttaataagacgcgtttccctgttgctgctgcagcatttaaaacttcttgaacacgattcaagttagaggctttagcagctacgataattctgcctttagcatttctgaagacattagtcacaaatttaccaatatcttgttcagatgcattagggaaagatgcttctgcattagatgaatcacttaaaagcgctaaaacgcccttttgttcaatttcagctaagcgatccatatcagtccgataatttaacgcagctgttggatcaaatttaaagtcaccagtataaacaatttcacctgctggtgtatgtacatctattccaagtgaatcaggaattgagtgtgtcgtatggaagaatgaaatacttgcattcttaaaatcaatttcagtatctgcatcgattacgtggaacaaactattcttacggcgtttgttttcgcgttgtacttcaattttagcaagttcgatactcaattgtgaaccaaatactggaatatcgtatttacgcaaaatgtatggcaatgcaccaattgaatcagcatgcccatgtgttaaaaagatacctgctactcgatctccgtattgttcaaagaaatcaaggtcaggaattactacatcgataccaaataaagaactatcagggtactttaatccggcatcaagaacaaaaatttcatcattaacttgaacggcaaacatgtctttaccttgttcacgcacaccgctcaagatcataattttgatttgatcagccattatatttccttttctatctaatttttaattcttatggatctatcgatctcaacgtaaaaataatctgtttcaattttagcataaagaataaaattatgacagagacaaaaaaagccagccttttcggctagcttcattattcaatattatgtgaaaattaacgacgaagacctaacttcttgatcaattcacggtaacggttaatgtcgttgttttcaaggtaacgaagcaagttacgacggtgaccgatcttcttaagcaaaccaacgtatgagtggtggtcatgcttgtgactcttcatgtgatcagtcaagttgttgatatcagcagtcaaaagagcaacttgaacttcaacagaaccagtgtcaccttcgtgagttgcgtattccttcataatcttttctttttcagtctttgaaattgccatagttaaattcacctttcattaaataattgccgttaacaacgtttatcgtcggcgtgaacaaataaacagcgttagcggttcacaacagtcataatcatacacattattttttaaaaaagcaagcagaaattaccttgcatccgtgatatttcttaagtataatggatgaagtaaatttctaaatcattggaggtgaatttcatgccacaaatcaaatcagctatcaaacgtgttaaggctcaaaatgctactaacgaacgccgcgcttctgaattaagcaagttaagaactgctatcaagaagtttaagaacgctgttgaaagtgatagtaaggaagacgtctccaagttgcatttagaagctgaacgtgctttggataaggctgcttcaaaaggcttaatccacaagaacaaggctgctcgtgacaagagtcgtttaaacaagttagcaaacaagtaaatcttacttattactaataataaaaagaggagatctgcagtgatctcctctttttgtatactcttagacatttaagataaataatttcaaaaaattatcttctcggtaagttccatttttatatttaaattctaagtcgattgcatcccttaataaattttctagcttgtctatcttcaaccgattacgtagggctaacttaaccctatagggatgaacgcctaattcttttacaatttgtggttcgctacgacctctttgtgctaagatcttaacgaccaaaatcaattctaattgattttcaaagaccgctaataattgaattggattagtcccttcacgtaattgattatctaagcgctcaactgcttcacggtaattcttatctaaagccgactccaaaatagcgaaaatattttgtgctagggacaaatctacattttgcattactgatttttcagtaattttgttatcggtagctaccatttttagcttttgataattgcttaaaatagtgtcaattacctgatcactccgctcaattagcagctgtaaagctgactgtgtgattatatatccctcatctttgatcaaggctttagtcgttgaagcaacttcatagggcctaatttgtggctcaaccacattgaattgctttagaacagttttagtcagttttttacgcctatcaattttttcataagaagcaacaattactactacatcttctaaatcagctaagttttcaaaaatcttttgtaagtcatcaatttgtttctgtaattttttagataccttagctgttaaaaagaaaggatttttgactacaataaatttctgttcactaaataaactggattcagttaagctcgcaatcaattcatctaagccatcgctttcgcaatcgacagtcacgtgctccaaatctttaaagcgatcttccttggcatatgatctcaccaagtaatcattgagaaagtcatctgcaccccaaattaaggtatgtggattattgttatttgtatttttaaacaaagaaagtaaggtcattttttatcccgctttaaaaagtaactaaatctaggactttgcagtccgccataataccagctaatcataccacagtcttgcgttgaaacccatggtatttgctgttgagttagtgtcgttagcgtctcttgatgggggtgcccgaacctattttttcgaccagcagaaataaaaacttgcttaggatggattgcacgtaaaaagtctggattggatgatgttttactgccatgatgacccaatttaaaataatctacctgaagtttcatcctctgcataatttccttttcaccatcttgacctaaatctcctgtaaacaaccaattcttattcgctactctaaaaagcaaactcagggaatcttcattctttccttctcctgcttgatatggataaaccacattaaatgtaatctgcggttctttcacccgcattcctgcaagtaactccaataatttggtatcttttacacgaccatctaatctcttttgaaaagatggattcttaattagtccttcggccataaataatttcttaacattaacctgctctagtaatggtcctaaatcaccaacgtgatcggcatcttgatgcgaaacaaagactccatcaattgtattaattccctgacttttcaaaaatggaatagtaattcgatcaatctgaggtgtctgctttttgccactaaagtttagtttcccaccagtatcaattaaatataccttgcgaggaaatggcgtagtcactagaatactatctccttggcccacatcaatgaaggttacttgccctcgcaaaggaaaatgaatcatgctgaagaaaattacatacaagctcaacaagcccaccataattttcttactattaaagcgccagttaactttttctcttaaagaaacaattaaaataatcgttactattaatagcaacagacactgccaccaattaatttgcccaaaagttagtagtcccaacttagtagcagataattgcccaatgattttctcacctaattcaagcactttttctaataccggagcaaaatctttagtcagaccaaacgtcacaatattgaaaaaagcaattggtaaaactatccaattgaaatatggcactactaacatattaaaaattacagttaaaaaattgacctgataaaagaaaagcaatagtaatggcgttaataaaatatttaacaaaattgcttgtttaaaactgccaaacttatcagttaactgtaaacccaatgccaaaatatagctcaataaggctccagttgccagaaataaacgcggtactactaaaagatgtaaaatgcaggtcaatcccagcagatctatcgacgcaacatgatatttcttaaacttacaaattttgcctaaaaagtaggttaaactagctcttacaaagccggcttgaccattgcttagaaaaatacctagcaataaaaccaatgtacagcagacaaaagtttcttcatccgtcagtttcaagttaaaacaaaatacactaattaacaagacatagattccaacatgtaagcctgaaatgcttaacaagtgaataacacccaaatctcgataattatttagtatttcttgattttcttgagcattattttcacccaagattaattcactagcgaaaaagcctaataactgtggcatcttggcaaaatagttctgcaattcaaaacgtaattgatgcaattgatccccaaaatcagtaatcgataatagcttcatttgacaactactgtatttcaatttttggtaaatctgttttgcctgataataattctgaaaattaaactcaccaatattagttgctggctcaattgaattgcattccccattaatttctgtcactaaaatagggttcccatgcttaagcagttctttttgaacatctgttaccttgccaccaattaaaattttaccttgagcgaaattacccacacctgttaagtagtcgtctttaattcttacctgatcagggtaaattcttaattggctctgctgggttaaaacaaaattggtttttggtttacttaaaaaaatcagtaatagaaatgctccaactattagactaactatttttaaactaactcgatatttttgtactaacagtagcaaaaagtaacccagaaaaaataaagctactattttttgcaccattgttgtacaagaaaaagccaaaaaagagattgtaattagcaacaaagcggttattaagtaaaagccaacttcatttttaaacagccaattgatctttaaggctcgcaaaagttttttctcctattcctgatacctgcattaaatcttctatctttttaaaagaaccattttgttcacgataagcaataatctgttctgcctttttttgaccaattccagttaacttttgtagttccgttacattagcagtatttaagttgatcttagtgccatccccttgattacttgggctactgctactagtactcccactattttgactattatcagctgatcctgcagttgccacattttcaaccttttcacccttgtaaggaatatgaattttatcttgatccttaagcaaagtagcgcggttaatagcttttaattgtgctctagcagtagtacctccagccgcctcaattaactcctgcagacgagcaccatttttcaatgtatatactccctgatgcttcaccgcaccggaaatatcacaagttacagtcttagaaacggttgttgaactactgctagtcactgcattagtattagtggttgcacctgaactactagtgctagactgcataacttgatcctgcactgcagcagcattttcttgatgatcccctttcttcaatccataaaatccaactacaagaattattgcaccaatgagatatgcttttttctcaagcacaaattcttttactttttcaaaattcataaaaatcacctctactatttattacgcaaaaaaagcccagaattttttctagacttcaaattttttgaatttttttagtagtgtgtctttagatagtttaatgcatcatcaaaagtgctcacagggacaattttcattttggtgtgaattttctttgcggttctcttagcaaccgcataattagtttcacttttcttcacactggttgaatcagtcggcgcaaagaagacctctgcaccttctctgctagcagctaccacttttttatcaacaccaccaatgattcctacttttccggtaggtgaaatcgtacctgttcccgcaatcttatgtcccttacttaagttctgcttggtaaagacctcatagctttcaagtgtaaacatcaatccggctgaggggccaccgatttcgccagcattaatttttaacttaggcttagttttcacaactacatgctcaactaattgaatcccaattcctggcttattagtaccctttactttaacaattttgccagtaaagtgtttctcttgcttaccacgcaaaactgagattgttactcgtgcaccaatcttttgtttacgcaaataatccatcatctcttcagttgagctgaaacgatgcccgtttgcgcctaaaacggtatcaccaatttggagcttatttttaaaactagaatttttctggacttccattacataaacgcctagatattttaagctatgctggttacctgcttttttagctgcataataaattgcattctgctgacttgtttccatataccagttttgcaactcattatattgagcactagtttgacctcctagcagctccttgcttgatacacgctcatcatacggacgagtaaaactccatagatattgcaaaaccggagccggccgactagttatgctaactgtcaccaaataaaaattattcggacgtttatttgatgacttaataaactggcccacgggcattgcctcaccaggatattcaatataataatcggtcggccaaacagcaagtaccactaataaaacaagcgcaattagtgccaagagccaattacgcaagtgctttttcgattgattgtttttcttattattcatgttttagcttctctctcaatgcaatcgctgcttttttaggtaaaaacagactaacatcttcatcaaaacgagctaattccttaatcatgcttgaagctacaaaagaattttctggactcgtaaaaagcaaaactgtattcacatctggagccaattttttattaatcccagcaatctcctgttcatagcggaaatcagcactgttgcgtacaccgcgcaccataactttagcatgcaattcatgtgctaaatttacagttacttcttccggtctttctagcacttcaatattaggtatttcccttagtgcatccctgattagatcagcacgttcttcaggcgtaaacaagtatttcttagctgtattggtcatcgcaactacatatactttatcaaaaatttcagcagcctttttagcggtctccacatgcccattagtaatcggatcaaaactccctggaaataaagcgattgtcattattagtcctttcgataaatcctcacaattgtttttcctaaatggtgttctttgatcaatgaaaaaccagtaatttcacccagttctgtatgatcatcagtttctgctaccacaattgcatgatcattaagtaggttcgactttaccatctgcaacatgtccttagcgattttttctttggcatagggcggatcaagaaaaactagatcaaacttttcatcattctcagaaaataattttaatgctgcagagctgcgcatattataaacattaaaacgctgctcttccttagttaaagcaacatttttcttaataattgtacaagcagcatgattaatatcaaccagactcgcatggtcacagccccttgaaacagcttcaattcctaaggcaccactaccagcatataagtctaaaacattaccaccctgaaaaaattgtcccaatgaattaaaaagggattctttcaccttatcactggttggtcttgtccgattacttttcaaagtaaataaatttcttttagcatatttccctgaaataattctcattttagttgattctcacttttttcttgttcaagttgcaatttcttttctgctttttgggccatctcagctaattgattttcaatatgttggctatccaaatttacttcttcttcagctgaaatttcgacatgattaacaaaatccaaatgagcaatttgtcctttgatttcattgcattcgttgcgattaacataaagaacacaatatttcatttttttagaaaaataaacaatgtcaccaaaatggcgcaacttatattgatcactaactgattttaaataaataatcaatgctacccttttaattaagtgggtactttcaatttctttattgatactcatgcaactgtttcatccttttcctgtaacattttttcatttgctgaaacgttcagtactaaaccaatcgcagcagtcaagacaatcattgatgaaccaccatatgaaataaatggcagcgtaacccccgtaatcggcaacaatcctagtactgcaccgatattaaagaatgcttctgtaaaaataatagtcgtcacgccaaagcaaattaatgcgtcgaattgagaaaccgcgtgaaccccaacttccataatctgccacatcaaataaaagagtaatccaaccaataaaattgtcagaatcacacctacttcttctgctgtaatggataaaataaagtcggtatacggctctggtaagtaacctcgcttttgcatactattacctagtcctacgccaaataatcccccattgtggattgcataataggagttaactagctgggccccacctttttgctctaattcaaagggatgcaagaacgacattagtcgttggaattgataacttctttgtaaaaatccaggattccaggcaactacaataaaaaatacagctgtcactaagatcacaatcccagctaaccaagttaaagctaatttagttggaacccctgatactgaaaacattactaaagtgatcataaataaaattgctgtcccaccaaaatcaggttcaacaataaccaaacacattaaaaaagccgccaaaattgctgggtgtgacaaattatgtttgatcttacccttgactaattttccatctcttctgtctagtacatatgacaaataaatgaccagagccaatttagtaacttctagtggctgcaaattgataaagcccaagttaatccaacctacagcaccattaactgccgcactactgccatgagcaaaacgtagaaatactagccatcctaacataagtatacaaattaataaaaatccccctacaaactttggatttttaaatactttgattcttaatgcaaaaaacggaatcccaaacaaaaagaaagctactatagcatagattgcttgccgtatcccatagacatttggcttaaatccattaactaataaaatatctgaactagctgaatataccaaaattatcccaaccactactaaaataagatagggaataaaaatctggtaattaagataacgtaattttcgacgcacaagcgttgcccctttatctaaataatacttttttcattataaaacaaaaagatcatcacttctatcaagtgacgaccttttaaaatttattaaactatcttagttagcacggttacgcttcttatcagccttttgacgttctgaagtgttcaaaatcttcttacgtaaacgaatagattcgggagttacttcacaatattcatcatcatttaagaattcgatagcttcttcaagagtcaacgttctaggagtcttaatagcagcagcgtggtccttaccggcagcacgagtgttagttaagttcttacccttagttacgttaacagcaatatcacgttcacgtgatgattgtccaacaatcataccttcgtaaacttcaacaccagcaccgatgaataactcaccacgttgttctactgattgaagtgagtaagtagttgattgaccttggttaatggataccaatgcaccattacgacgacctgggttccagttctttactactggcttatatgcttcaaaggtgtggttcatgataccatatccaccagtttgtgacatgaattcattattgtaaccaatcaaaccacgtgatggaactaaaaattcaagacgagtttgaccattaccagttgattccatattcttcatctcaccttttctttgtgaaagtgagtcaataacagaaccaacatattcatctggagtatcgatttgtactgattcaaatggttcgcacatagtaccatcaatttcacggtaaataaccttaggacgtgaaagttgtaattcgaagccttcacgacgaagttcttcaaccaaaattgaaaggtgaagttcaccacgacctgaaacagtccaagcgttcaattgatcagttggttcaaccttcaaagaaacatcggtacgagtttgacgaatcaaacgatcttcaagcttcttaggagttacttgatcaccttcacgacctgcaaatggtgaatcgttggcaacaaagtccatttgaagagttggtggatcaatcttaagaagtggcaatgcttctggatgttcagctgatgcaatagtttcacccacgtagatatcattaataccactaatggcaataatatctccagccttagcttccttaatttcgttacgtttcaagccaaagtaaccaaataacttagtaacacggaagttttgagttgaaccatcacgcttcataacagtgatgttgtcactaactttaaccttaccacggtaaattctaccaacaccgatacgaccaacatagtcatcccaatcaagcatggtgatttggaattgtaatggctcatcagagttgtctactggagcaggaatattcttaataatggtatcaaagattggatccatagtttccttttgagtacttggatctggatcatatgatgaagtaccattcaaagctgatgcataaacaactgggaagtcaagctgttcatcgttggcacctaattcgatgaaaagttcaagtacatcatccaaaaccttcttaggacgagcgcctggacggtcaatcttgtttaaaacaacgataggttttacgccagcttccaaagctttctttaaaacgaaacgagtctgtggcattggaccttcataggcatcaaccaaaagcaatgcaccgtcaaccatgtgcataacacgttctacttccccaccaaagtcagcgtgacctggtgtatccaagatgttgatagtagtatccttatacttaacagcagtgttcttagacaaaatagtaataccgcgttcacgttcaatggcatttgagtccatagcacgatcttccagattcatgtgttctggcaaagtatcagattgcttcaataattggttaaccaaggtagtcttaccgtggtcaacgtgggcaatgatcgcaatgtttcttagatcgtctcttcttttttctgacaaaagtattcctccccactcttcaataaaaaaactgtgactctgtcacagtttcggtaacgcattagcgccttatcgaagtgcttttcttaaatctgtatagttacgttagtgaattttaccacctaactgcatacgggtcaacgcttaacaatcaagttaaccctggatttttttatgcaaaaacaagcaaaaactattaaactatggtaaaaatataatgtagataataatttttaaaaaggagtaattattttgatcttaatgaaagatatcgtacgtgacggtgatcccgtcttacgtcaagttgccaagcctttaacatttccatttagtgatcactataaaaaattagctgatgatatgatgcaatacttaattgattcacaagatcctaagattgctgaaaagcaccaattaagagcaggcgttggcctagccgcacctcaagtaggtgaaggtgtacaaatggctgcacttttagttcctgatgatcaaggcaaaattatctttaaagaagtttatgttaacccagagattgtctctgaatctgttcgtcaagcttgtcttagcgaaggtgaaggttgccttagtgttgatgaagttattaatggttacgttccccgccctgataaattaaccattcattactacaccgttgacggtgaagaaaaaaccattcgcttaaaggattacccagcaattgtttcttctcatgaaattgatcacttaaatggtcacttgttctatgaccgcattaataagcaggatccattcgcacttaaagaagatacagtcgtaatttcttaattgttatttaaccaaaacaaaagcctgcagatgcaggcttttttgtataaaaaaagtcactggttaactaggccagtgactcatacattgggaattaagaagattgaagagacttcttataacgagcaaatgaatttattaatcatttactacatgattatcgtacaactgatgttattttacgtcaataacattgaccaaatttaatcggtaaaaatcaaaagaaacataattatatacttaactttataattatgataaaatttttatagctattgagtaatttttactctacattgaacgtttatacattaataaggagaatcatttatgatttacaaagttttgtatcaaaaagacaagattgtcaatcctcgtagagaaactacacaaactctttatatggaagcagacaacatggtcgaagcaagaagtatggttgaggacagtaccccctataacattgaactcatccaagaattaactggtaattcgttaacttacgaaaaagaacatgctgactttaagttaacaacgttcgacaagaagtaataaagagtgcgaattaaaaataatgaagtagccgtttatgcaatcggggggttgcatgaaatcggcaaaaatatgtattgtgttcagtatcaggatgaaattatcatcatggactgtggtattaaattccccgaagataacctattaggtattaattacgttatttcagactattcttacctaatcaagaatcgtaagaaaatcaaagctcttgtggttagtcacggacatgaagaccatatcggtggtattccatttttgttagaaaaaattcctgaaattcctgtctatgcgacaccatttgccctttcattaattagaggcaaattggaagaacacggaattttaaagacaactgaactacacgaagagcatgaggatactgttttgaagtttaagaaactttccgtttctttctttagaactactcactctattcctgatactttaggtattgccgttcatacaccactcggtgccgttgtctttactggtgactttaagtttgacttaacaccagtaatggatcaacctgcaccagattttcaaaagatggctcaattaggcaatgaaggtgtacttgctcttctctcagattcaactaatgctgaagtaacacaatttactaagtctgaacgatttgtagctaagtcactacataatatcatcactggaatccacggtagaattatttttgccacttttgcatctaatctttatcgtgtatcaactgctattcaagctgcaattgataccggtagaaaggttgcaatttttggacgtagtatggaaaatggcgttgataatggggtcgacttgggctacttaaatttgcctaaggatctaattgttgacgcagatgagatcaacaaactaccacctgaaaaagtaatgattttatgtactggttctcaaggtgaaccattagccgctttatcgcgaattgctaatggtactcaccgtcaaatcagcttacaacctggtgatacagtcatcttctcctctaacccaattccaggtaacacattaagtgttaaccacttaattaataagttaatggaaggcggagccgatgttattcacggaagagtaaataacgttcatacttccggacacggcggccaagaagagttaaagatgatggttcgcttagttaagcctaagtacatgattcctgttcatggtgagtacagaatgcaggttattcacacccagcttgctcaacaagccggtgtacccgctgaaaacacttttgttttatctaatggtgaagttgtctgctttggccctgatggcgctagaatcacaggacatattcctgcaggtgacgtttacgttgatacttctggtactgcagatgttggcaacgttgttgttcatgatcgtcaaattctttctgaagaaggtttagttgttgcagttgctacagttgattataagcacaagcgagtcttagctggtcctgatattctcagtcgcggatttgtctacatgcgtgaatcaactgagttaattagtcaagcgcaaaagcatgtttatcatgtgcttagaaatgaaatggctaaatcaaatagaccaaaagaaagtgacattaaaaaggcgatcaccgaaaatctttcagacttcttgtattccaagactgaacgacggcctatgattttaccaatcattatcgaaaagaaatagtaaaaaagactccttagggagtcttttattttagaaaatgaataatatgcataaaaaaattaaagttcagttattagttaatgaggtcgctgggaatggcaatgctattaaagctgataaagaattacaagatatactaaaagaaatgaatacgcgtggtgctagttaaatcgttctagacaataagccaaattataagctaaaattgcaatttccaaccggctttgaaagcctatcagactacgtgctcgattgttctcggcattgtaataggtcagaagcgaaaagtcgctttcaattgttctgcgaatagccatcaattgatgatcattgtgctttttagctcctgtcatatttttacgatatggtgtccaaagttcgtaacccatttgttttagctgttgatgcagttctttgcctaaatagccttcgtcgccaagaagatagtaattagatggatgggtattttctatcagttcaactgtctccctggcatcatgaactgatgcctttgttacgacataatcaagaatgtaaccgtcatcgctaacaatggcatgaactttgaaaccatagaagtaaattttcttggtggccttataaccaatgttggcataaccgcgaaaaattttagcacgatagtttcgaattggttggcaaacaggtaccggaaagctgtcaatgatcaagaactgtccattcaggtcaacctttttattcatttcttgccgtatctgataaatcaattgcaatagctgacgtgaacgccgattaaaacgtgagtgtgataaacaattgaaacattcacagaatcttctttgtgattcaattcctgtcttagcttgccagataagtaaagccaaaatcagactgtccgtagttttaatttgatcaatatttcgccgatgagtaaactcagccggtgcatacaaacgataccagtgccgacaaattatcactaaatctttaaaactaacttgtaaatggtggctaaaacgcttaagcttaaggcagttcaatcagatcagactcttttctattattactatttacaagtcgagtctaacaagattggacttttttattaactaaaacgatttaactagcaccacgcgtaaatgaatattccttttaagcgacaaaaaagtcattatcctggagaattagtcgttctagcacaaaattacgctaatttacatctctcttctgaacatgttttaatcgtagttggtggagatggctcctttaatgaagttttaaatggaataaagacttctaattatcctgagacagctattacttatttgcctgcaggaacaggcaacgattttgcccgtggtgctggattaaccgcagatcccaggcaattaatcaacaatttgctccgagatcctgaaccggaacaagttgattgtggttttttcacatcaaatattaaacaaattcctaagggttactttgttaataatttcggtattggttttgatgcctttgttgttcatcagagtaatcatgagcaattaaaaaaacacctcaatcacctcaattctggaaatatgatttatggcctaaatataatcaaggcactaattaagcaggatacctttacagtgactgttaaaactaaaaacgaaactcttcgttacggagatgcatactttgtcactactactaaccatccctactttggcggtggttttgctattttgccaaaagcggacatttacagtcaccatcttgatacagtaattgttgaaaaaccgagtttacgcaagtttctctggctttttggtaagctgatcaaagatggttcacacgttaatgcaccagaatttcattatattgaagctaaagaaatcctagttcaaaccaataaaagtgaatatgctcaaattgatggtgaagatattgaaaagcagcccttcaaagtaacatttaaagttgatcattttaatttattaaaataaggaagaattccaaattcttccttttttatatcttatctaaaatatctcttttcgaattatgattttgataatattggtcctgatcaacgaaatcatgtacttgatcataaaatttcttccaataacggtatttttgatactgcttttgccactcccgtgcttcctgcaagtaattaccaagaagtccattaatctgatcgatatgtttaatcacctgattagcatgatacaattgctcttccacctgcttttgagttaacgttgactcctgatcttcaaaaaatagaacattttcttgataatttttttcttcttgcaattgtttactattgtccatttcttctttgatagctgcaatttcgtctggctgtaatccaattccagttttagctttgactaataacgactgaatatctgccaattgcacaacatctatttccattttttgataacggttcgaatcagtcaatgtgaactcatcatctgttctacttacaaatacaaccacgtttctgattaattgatctatatttggcaagcgtctcaataaattaataatcactgggttgttgcttttttctaggacatatttaatactttctttatgcttggccacttgatcggctatctgatcataatcagcctgcacattatactgtccatttttacttgttcgtgctttggtttccaagcaaaaaatcccgctagtcgtaattatcacatgatcaatttggttactccctaaactattctttttttcatagggatatggtaacagtaaattatgaattatttctttccctgtctgcacttcacgtaaacgagaattcactaattcttctgcggcagcgcctgccaagagattgctaagatggcgcaaatcacgttgagataaaatattcataggtcgcaaattttttatttgattcaaatgtagttcagtcattcttttctgaaatgcgtttactttttgattgtaaaccttatagccagaattaattgcccgaattcgtaaaacattttgcagagccaaagctcgtttcaaatcacgtttattattcaacaaagttttttcaactatcatagcatcatgaacagtttgtgaatcagttacttttttatgtgtaatccaagctttttgataactagcatgattttctaactcattcacatactgatttaagtcattttccaaaggcaaaattttgtttctaccttctttgactattgagccataatagcgcaaattttttgtaatttcgtctaactcattgaattcatgtttgccataatggtaagttaccttagtttctccattccaactagtcttacgccaataatgaccatccgtctcaccaaattcaactaattccgccactgaacgatctaaatagtacttaatcaaataatgacaatggcctttattgtcaaaaatgcgtcgcttaatataacccggtcgcattaattcaatgatctgaaaggtcaagttcttatgattaggaaaacggtatggtaatcttttgcctgcaattttttcaattttagttatttctttcttatctgttacagataattctatttttttcattttcttcttttttcgcttttgaaaaaaataataggttaataagcctattgttagtgtaattattgtaatatccatgttaattatccatattttggaacgtatgtttagacaacaataattataccatgattttgtataatgaaaaagccccttgttttaacaattcaaggggcttttatccttataatttgatattttccattccaatcattggatcaatttcaccagaatatattttttccgaggttagaacaaaatcttctgctacttctgctttatcggtttcattctccatttcttgagctttttcgtgctgcttgctttgatcagatttatccaatgattttgtaatacccaattgctgacaaatcttcgctgctaagccagtcttacgatcatttcccggcgtcttaaaagctgccacaaatgcccgtggatcaccaactaatactaagtttttctcagctcgcgttattgcagtatacaaaaggtttcgttttagcatcacaaaattctgcatggttagattcaagatcaccaatggaaattctgaaccttgtgatttatgaatagtgattgcataagcccgggtcagatcatttaaatcttttctagaaaaggcaacttctcttccatcaaaatctgcaatcatgcattccttggcatcatcttcatcaatgctaatgatcttaccaatttgtccattataaatatctttttcaggattattttgcaattgcagaatacgatcgccaattcggaaaacttcattatgtgcttctaataccttacttttaggctgagatgggtttaaaattgcctgaataacattattaagattagttacaccaccattgccaagatacatcgcgctaagcacttgaatatcatcttttgcaaatccacgttttaaagcaagtttaacaatttgtccaactgcatcccctactaattcgggacgacagctaataaaagaataattatttgttttcttaaacaatgcttgctgatctttaccctcattaacatcatgcgccaaagtaataatcgttgaatcatcaccctgtctatgaatctgcttcaaaatagtagttggaaacgcttgcgatttaatcaggtcactgaagacattgccagctccaaccgaaggtaactgatccttatcaccaacgaaaacaatatgccgcgtatcatgaatacttgccaaaagttgtttaaaaaggaacatgtcaaccatcgacatttcatcaacaattaagatttcaccatttaactcattcaagtcctgagtgttagtatcaccaatacctaaccccaacattcggtgaattgttttagcactgattccggtaatttcacccattcttttagctgcacgtccagtcggtgctgctagtaaaaacggaggatcttcactgtaaagagcggaggaaggaatctcagccagcttgcgtaatactaataaaattccattaatgatagtagttttacctgtacctggtccacctgtcaaaatagaaatcggttggttaactgcgtttttgatggccaacttctgtgtatcgtcgtagtgaatcttaagttccttttcagcatccttgattgcttgctctacctttttatcatcatattgttctctttttttatcttcttttttttctaccaagtttttcatcaagcgagcaatatcaacttctgtttgataaatattttgtagagcagcattctcaccatcaactattactttgccagcttcttgtaaactattaatacagctagcaattgggtcgaattgattgatttgaagcaatttacttgcttctgttaataactcagctaagcctacataagtatctccctcaccatttaaagcatcgagtaatacttgataaacagcacctttaattctacgtggatcatcactagcaatatctaattggcttcccatcatatccgcggttttaaatgcaaaacccgaaatatcattaactgctgcataaggatctttctctagttttgctaatgcttcaccatgataaagctggtaaacccgtcctgcaatacgcttattaatgccgtatttagccaattttaaaattacttctgaataagaatccatcgcatttagtcctgccaaaagactatccttttgctttctagttaaagaaagcttatcaatcttagctggactttccttcaatacatctaaggcatttagccctaattcatcaataatcgtagtcgcagcctttttaccaattccagggaacttattcgaactcaaatacttagttaaagatccctcttcatgtggcaatacttgcttatagttatttgctctaaactgcaagccaaatttttcatgcattactagtttaccctcgaagcgatagctactattaatttgaatatcgccaaaattccctgtcaccttaatatcgggacgagaataatcggataaagtgccgataatttcaacgtcaagaattttatacaagtctttactattttcaaaaacaatcccgttaaccttaccggtaaattcattcataatttttcttttccttgtcatttagcatcttcataattgaagcatactgattcattgcttgttgataatacttagcatccatctgcttagcttgagcaaaatatttttgagcctggtcacgatctttttctaatgtagtgacacctagtaaaaaataaactttcgcatttttcttattatcaggaattgccaaatacatttgctgagcctgttgattctcacccaaacttaaccaaatatcgcctagcaattcctgaattcgctcatcaatttttttgatcgtcaaagcataagctaaagctttttggccttgccctaattttaagtaagttagtgccttttgataaagagttaagtcatcattaggtatctgatctaataaagccagtgctttatcaaaatcgccttgcatgtaataacacactgccagattataatttaattcttgtggctctttaaccagatgctgggcctgctccaatagcttctgtgcttgatccaagcttccttgctcaattaaatacgtcgatagctgcaaataattagcaacttgttgtggatgctgatcgatttttttgattaaaagatgaatggcttgttctactttaccttcatcataaagttgcgctattttttgatccattataacgagtccgtcttcgataatttacgtcctaaataactagtttcattccacactaccggtttaaaagtctttccgccatctagtgtttctaagacagttaaagaggtattgctaaggccgccatttttgcgaatatctttcaatggatagcctaaaagtccacccataatagctgataatgccgcaccatgactaactgctagaatcttatcatcatcgtcaggaaatctttgtgccatttcttgagcaaatgcttttccacgagcaataacatgtggataatcctcaccatgaagttcagtcggatcatatttatctggatggtgccaaaaattatccatttgtttagggaattttttctctgcatccccaaacttcattccctccatatcgcccaaattaaactctctgagtcgttcatcgatcacaacaggtaagttagcgttcattgcatcatcgatgccctgagcggtattaaaggcccgatcaagcggactggcaaaaattcctctaaatttagttccttgcaagtgatgacctaatttttttatatcttctaagctttgtggcaaaagtggtgaatctccatgtcctccttggaagcgactagctaaattccactcagttttgccatgacgaacaaaataaatttgcattgcttaaatccccctaattgtctaatcaataagaatagtttagcacaaagaaaaaggcgttcgaaaaatcgaacgctctttttgcatattttttaaactaattgtaattgcttttcttcttggtaagcagcatcaatattaccgccacctaaacattcttcacccttgtataaaacaagtgcttgacctggtgtaactgcacgagctggctcatcaaagtaaacatcagcagtattgtctgcggcatgatacttaacagtcacgccgatatcacattgacgataacggaactttgcagtacagtgcatctcaaaatcatgatctggcttaccagtaaagaatgacatatcacttgcattcaagcgactagcatatagaagtggactatcatagccctgctctacaattaattcattcttcttaagatccttgccgaccacgaaccatggatcagttgattccttagttgagcccaagcccaagccctgtctttgaccaatggtgtagtacattaaaccagcatgctcaccaactaccttaccatcaggagtgaccatcttacctgatttagctggtaagaattcacttaaaaactttctaaagtttctctcaccaataaagcagatacctgtagaatcttttttcttcgcggtagctaaaccattagccaaagcaatctctctaacttgtggcttagttaggttagctagagggaaaataaccttactaatctgctcttgactcaattggctcaaaaagtacgtctggtccttgttaccatccttaggacgcatcatatgagtaacaccattggtatccttaacagtcttagcatagtgccccattgcaatgtagtcagcatccaagtccatcgcaaactccaagaacgacttgaacttaatctgactattgcacattacatcaggattaggggttcttcccttcttgtattcatccaagaaatattcaaaaacgcggtgccaatactctttttcaaaattaattgaataatatggaataccaatcttatcggcaaccttttttacatcttcatagtcttcagtagctgtacagacgcctgaatcatcggtatcatcccaattcttcataaagacaccaacaacatcgtagccttgttgtttaagtaaaagtgctgaaacagacgagtcaacgccaccactcatacctacaactactctagtcttgctattgtcaaccattattcaatcaatcctttacttcaagcaaaatcttacgctcctcaagatcctttaaaatataatctaaaagttctacagtaggagctaattgcttatttttaaaaatattaaccttctgcaaaccgttgcgatcagtaataaccatagttaaatgcgacaagtccttattaatggtcatctttaacttagtaggcgcgttataaggtgaatcattgtaaagaggatgttcataattaaaattacccttagctgtcttcacaaagccagcatcaatcaaagcataaagcttcaactcaagattcaaagtaaacttacgtttatcaccattaatcacaactgtatttgccataattttcctcacttatttataataagatactttctttttgaaagcaactatttatttttagattgaattctttgtacaatttttactaattcttgagcgaattgctcaatttcttcatccgtattataacgcccaaatgaaattcggatcgactcatttattcttggtgaattttctccaaaacaagcaattaaaacatgtgatggctccaaagaaccagcagtacatgctgaaccgcctgacacggcaaatccattcaaatcaagatttgtttgtaaagaagtagtagatacaccattgagatgcagattaagcacatgatgtgagtaacccggaccatacccaccattaatttcataattaatttgatgatcgtctaattcctttaaaataatgtcttgataatgagcatatttcttttgcaaagcatcacgaccaatctcggatacttcacggacagcttcgccaaagccggcaattcctggtacgttctctgttccagctcgacgtttggtttcctgctcaccgcctaaaatcaaatttggaatatcgatatccgcattttcatataaaaagcctaaaaacttaggtccattaattttatgtgcagaaacagacagaaaatcaatgttcatgtccttaacatcaattttaattgtgcccattccctgaacattgtcaacatgaaaatatgcattggagtcctttaccattgccccgatttctttgagcggcataatggtaccaacttcattgttaacggccataatcgatactaaaatagtgtctggcgttaattccttttttaactgttctaaagaaatttgcccgttttcatcgacattcaaatagacaatgttgtagccctcattttccaaacgtttcattggattaagaaccgagggatgttcgatcggcgtagtaataatctttttaccaatatttttacgagcataggcagttccaagaatcgctgtattattgctttctgaaccacctgaagtaaaaataatctctccatcttgagcattaatatcttgagcaatctggtgacgagctcgatcaattacatttctggccctacgacctaattcataggtactagaggcattaccaaaatcatttttcatttcatcggtaataatatcaattaccttgggtgacattggtgtcgttgccgcattatctaaataaatttcacgcacgtttaattcatcttttctacataatcactaattaacttagctgccttagcgccgacttccttgacaaacttgtcaaaatcattgtctgcattagcatccccattatcggaaattgcacgcatagcaaccaacggagttttaaaatgacgagcaacttgtgcaaaagcggctccttccatttctactcctaaagcttctggaaagtttttcttgattaactctttttgttcttctgattgaacaaaagtatctccagtaacaacaagcccttccttaaaatctacgtcttcttcacctaaatatttcttaaatgcttccctttcaggcgaattcaacttaaaggtagcaggctctcttggaatctgaccttctacatattcaccggcactaacacagtgagcatcgtgataggcaaaatcatttactaaaatcacatctttacgatgaacatcatcttgtaatgatccagcagaaccagtcataaaaattacatcaattttttctttagttagtaaactagtcagattcatagcggcattcactttaccgataccacttaaacctaaatatacatcattgccattaacagaaaaatgttcgaattctgttgatccgaacatttcttttgtttctgcatggaaatgatcacgataaaattcagcttcttccgccattgggacgataatcgcaatcttcaatttatttcctcatttccactataaatgaaatagtgctaatagcaccaatataattaaaacaatcactatcaggatagcacgattcaatctttttttcagtcttaaagacttctcttggcgaatcgtttccttatcactcgattgattatgctgataaaattcttgtccatccccagccagagggcgtcttctaggttcttcttcagagtcatcccgcttaaagtcaggatttacatctacttcttctgaatcattatcagaaaaggaagattttagcttattaagtaggctttttttctgccttttacgataatcagagcgtttttctaccataactaatccttattatcggtctgagcattacgcaacatcatattctcccaaacagtaattgcataaattgtctttgcatcaacaatttttccttcagccaataaagtttttaattcatctaagctataccaactagaagttaaaaattcatctgcatccagtgcccgcttatcagtcaatttagttaaggtatcacaatagaaaagatacatcttttcatcacaaaaaccaggagaagaatagaattcactgaccttttcccagtaatctgtgcgatagccaccttcttcattcagctcacgcttcattgcatcaagcggacttgcatcagtggaatcaaccaaaccagctggaatttccaaagtaatctgcttaattggttcccgccattgctttactaacaacatcttttgttcatcattaattgcaataacagccgatgcaggcttatgcttaataacttctctagttgcagtttcaccattaggaagcttaattgtacgaacagccagatccaaaatacgtccttgaaaaatctgctgtgacgagatttctgtttcctttaaatccaaaatcccagctcctttttaggctaaataaacatttacacattgcagaccatttttaccttgagctaactgatatttaactctttgacctacttgcaaagttttatagccttcctctttaattgctttatagaagacaaaatatgacttatgattacgatcatcttcaataaagccatagctactgccttcatcaaattgttttacagtacctaaccgcattagttttcaaatccttcttgaacagcttctgggtaatctgcttcaacgattttagcacaacgaccacaaagcattggcaactttggatctacgccaatatcagttctaatcatccgacaacgaggacatacttcgccttcagcatgttcaactactacactagcattattcaattgctttgcattatcaggtgcttcaccatcagcaatagttaacttagatacaattagaatttgtctgaaatcagcatccaagtcttggagcattgccttagtttccttatctgggtaaatagttactgttgcttcaaacgatttaccaattaacttcttatttcttgcatcttctagagccttcaagacgtcatcacgcaacttcatgaatttaccccaattttcaagcaaatcatcatggttagcatattcttcaacttctggcatattagcaagttgaacgtaatcttcaggttctttcaagaagccccagatttcttccatagtgtgtggcaaaattggtgttaagatcttagccaatttaacagcagcgtcgtaaataacagtttgcattgagcgacgatcatggctgttttcaccatcaatgtaaagtacatccttagcaaaatcaagataaaatgcagaaagatcattagaaacaaagttgaagaccttcttgaagacagtagtaaaatcaaacttgtcgtaagcagcaagacagtctttaactaagtcatttaatttcacttccatgtattgatcaactgaacgaagatcagcataagcaacgcgattttcttttggatcaaaatcactagtgttggccaacatgtaacggaaggtatttctgatcttacggtaactttctgcagactgctgcaaaattcccattgagactgcaacatcagaagtagtatcagcttgagctacccaaagacgaataatttcagcacccatcttcttaattacatcgtttggtgaaattacattgccaagtgacttagacatcttgtgtcccttatcatcaagcacaaagccttgtgataatacttctttataaggtgccttaccagttactgcaacagacgtaatcaaactcgaattgaaccaaccacggtattggtcactaccttcaagataaagatcatctggatagtgtaaaccatcacgtttttccattacgcctgaccaagatgaaccagagtcgaaccaaacatcaagaatatctttttctttagtaaactcgccatttggtgaatgttctgaagtaaagccttctggcaacagttccttagctgtatgagtgtaccaagcatttgaaccttctttttcaaagatcttggcaatatggtcaatcgtttctggagtaacaattggggtaccgtcttctgcatagaagatcggcaatggtacaccccaagcacgctgacgagaaattacccagtcgccacgatctttaatcatgttgtaaagacgagtcttcccccatgaaggaataaagttagcttgttcaatttgatccagaatttgatctctaaacttagaaattgaagcaaaccattgagtagttgctctgaagacaacgggcttcttagtacgccaatcatgtgggtatgagtgagtaaagaagcttaacttgagcaaagcgccagcctttttaagcttatctgctaccaccttgttagcatcatcatagaacattcctacaagatctggatctggaatatctttagtaaagcgaccttgtgcgtccattggactgaagaccgggataccatacttttgaccaacacggtagtcatcttcaccaaaaccagtagcgttgtgaactaagccggtaccgtcatcatcagtaacataggtgtcattcattaccaaaccatattggcctacaccagtcttaccataaaggggatgcttataagtcatcccatcaaaatcagtaccttttaattgtttaagtactttgtagtccttccagcctaagtcttctgcaatggctggcaaacgatctgaaccaattacatacttcttaccgtcaacttctactaaggagtagtcaaatcttggattaacggtaatacccacgttacttggaatagtccaaggagtagtagtccaaattactaatgaaacatctgaatctaagatacctttaccatctttaattggaaaagcaacataaattctaggtgatttaatatcatggtattctacttcagcttcagctaaagtggattcacttgaccatgaccagtaaactggcttcaagcccttataaatataaccttttttatacatttctccaaagacgcgaatttcttgtgcttcaaagtcatgttgcaaggtaatatatggattatcccaatctgccataacgcctagacgcttaaagtcggccatttgcttttgaacttgttcttcagcatattgtcgacaaagctcgcgatacttagcacgatccattgtcttacggtcaacgccttgcttagctaattgttgttcaactggaagaccatgagtatcccaacctggtacatatggtgcataataaccgttcatattcttgtagcgaacaatgatgtctttagaaatcttgttcaacgcatgtcccatatgaatattaccattagcaaatggagggccatcatgtaaatcaaaacgaggcttaccttcgtttaactttaatctttgttcatataacttgttatcttcccattctttttgccattcagcttcacgaacaggtagattaccgcgcatcttaaatttagttttacctaaattaagggtatctttgattctcattaacaaaattcctttctaaaaaagaaagcctcatcctaaaattaggacgaggctaaccgtggtaccacctaaattgaacttattataagttccacttaactttgcgtaacgtgcaaataccgtttagattaattaggcagctgatcagctcttaggctcttatgctagtcttccaccatcactagctcgctgaattgccttcaagctttactgtcaatctaatatgcttattttttatagtcgtcaggaaaaacaattgttgggcctaaaggatctgatttcatttcaggcttaacattaattgtttcatgacttggactgtccccggtcattggtttaggtgcagcattttcttcattatctgcatcgtcagaatcatccggttgatccaactccaaatcatcagggccttgagaagagtttacgtcattttcatcatcattgtcaacatcttcatcttcaacgtcttcatcatcagcacttactggctccgaaccatcatctggataataacgctctaagttgaagtaatcatccaatgcatgttgccacttttcatcattcaaattatcgatttcagtctgtagcatttcttgaatattactacgaaattcactaacttgctcttttacacgcatataatccgtagaaatagtatcttgttgatgcttttggaagttaatattatcttccgcttgctttttggcatccgcaataatctgcttagcctctgcttctgctttctctctaatttcatcagcagtttgttgtgccgaaattaatgatttatttaaagaacgctttttttcgttatattcattaacttgatcttgataatcatctactttttcttgtaaatcagttaactttttatttaaagaaactacttcattcttcaagtcaaccacttgatcaagtgtatcaccataatcatcaacaatctgatctaagaagctatctacttcaagacgatcatatccattacgaccacgccgtttaaattccttgttgtgaatatccatcggggtcaattgtgtttctttgtctgccaaagtctgagcaccaccttatatttaccttttcttgtagtcgaaacatcctcaatcaaaatccgaccaaagtgtcttaaactcaagacatcgtcttctttaatcattatattagaatctgctatttcatgccaatttaatttaaccagctgactattaatcatcttttgaatttgaccgcggctttgtctgctaatacccgataatacagcatcaattcgcattgaggcaactattttcgttttttcaatcgaatcatcctcaggaaccaaaacttctttgaagctaatcggtctcagctttacttttgctctgccaatgcggtcaatttgctcttcaaaaaattccgtcatttcttttttagtgaaaaactgccattttccttgattatcattaataatatcgccaaaaatacttgtatcaatacccgaattcgccaaggtgcctaaaataacactatgatttattttagtaaatttttgcggatattcaatttcatacggctgaatctgataatcactcggtcgcagattaagccattcttcacttaaataaactcgctttttctctgcattaggatagccaccatactcttgaacaaatgcatcattaccaacaattgttcttaaaattgctcgttttcccggatccaaaaaatcagtcaaaattggctcatgcttaaaaatcagctgattaaaaagaccagtaaaatagtcaattactggtctttcctcttgattaaaatgtgggtaaaacttacttgcctgtctgcgttccattacaccatcatcctcaataaaatatcaaatatccatcttaaaacatagttttgaatgaaatataagataaataaagcaataattggcgagacatcaattccagttgaataagctaatctcgcaaatggaccttttcgaaacaaatttaaatatggatttacaaccttgtctaaaaagcgaccaacaacagaattacttagcattggtagccaactcataattgcatcaatcacgatcagcagactataaagccataaaatccacgtcagtgccaagtagattaaatttaatatattaaccattagcttaaattgtctttcttatccactaaatcactaattttgccatcagtaacaaactttggtggagttgctaaaaagattttatcaccaatacgttggatttcaccatttaatgcatatacagtacccgtgatgaaatcaacaatccgacgtgctgaactgtcttccattctgctaaaattaatcactactgctttattatttaataaattttgtgcaacatccttagcatcggaatatacccgtggttcatataaaacaatcttgcttttagccgaattcaagcctgatttaattgaaaccacattatcgcgattaactgagttcagaggcaagtcttcattttcatttttagtctgtgaggcatattcttcgtcattttctaattcatcatcattagaaattccgaaaaatcttcctaatttatcaaaagccatttatactacctccaaaactagttttcactacgatgtttaaaaaatggaatatcactgttatcatcactatcgtcctgagcgctagtttcaatttgagaaatactatcctggtcttcatcactaaaagtatcaaaaccctcataatctttcttaggctcagtaggttgggtatttcttctttgattgtcttcgctatcatttagtccccaaacactggttggatcaaccatcgtttgcttaggctgctcaggttcttgtttttcggcagcaggctgaactgtttgtggtcgatcaactggttgcttaggttcttcagccttaggagcttcttctttttctttaactggttgagccttaatttgttggctacgacctggtaattgcttagaagcagcttcttcagccttagaatcaattccagtagcgattacagttactaccacctcatcgcccaagttaggattaattgaagtaccgaaaataatgtttacatcgtcaccagcagccttagaaacaatctctgaagcatcttgagcctcaaataatgtaaggtcaggtccaccagtaatgttaagtaacacttgcttagcaccatcaatagaaacttctaataatggtgaagaaatcgccagcttagtagcttcaactgttctattttcaccgctagcacggccaattcccattaaagctgcaccttgattttccattacagtcttcacatcagcaaagtccaagtttacgtagtcagttgaagtaatcaaatcagaaataccttgaacaccttgcttcaagacattatcagcttccttgaaggcatccatcataggagtcttcttgtcaaccatttcaagcaaacgattgttagctataataaccaaagtatcaacatattgctttagctgagtaataccttctgcagcgtttttagagcgcttagggccttcaaaactgaatggacgtgtaactacgcctacagttaatgcgcccgtctcacgcgcaatttttgccactacaggagccgcaccagtaccggtaccgccacccataccagcagtaataaagatcatatctgcacccttaagtgcatcttcaatcgtttgttcactctcttctgcagctttttgtcctacttcaggatgtgaaccagcacccaacccacgggtcaacttaggccctagttgaatcttgttttcagctttgttgctgttcaaagcctgaacatcagtgtttgctgcaataaaagaaacaccttgtacgccatcgtcaatcattcggttaacagcattgccgccggcaccaccaacaccaattactttgatgacagcattcttattgtcgtctgaatcgaatgtaaaatccattaaattaaccacctttaatcaaagaatttcttaaagaaactcttcaagctattagttttttcttgcttagtattattttcatcgtctggcacagattctgttctggcagacattttgcttctattataagcttctttagcttcactttcactattagaagtcgtacttttagaaatcttggtactttttggctgagaaacggggtcttccacagcgggttcaccaaaaccatagattacgccattaacaagatagtcaacttcagacatcttatatgaatagtggacgataccataagcagctgtataaatcggattacgcataccaatttgatctggttcataaattcgggccttaacatttaacccattagcagtcagactatcaattccttgtaataggctactaccacctgtaatcacaataccacctggttgcttcaatgcattatgcttaactaaaccttttcctaaacgagtcaaaatttgttctaagcgtgcattaataatttcactaagatatacttcgtcaaccatttgctgactatttgcaccaacactattaatagcaaatttatcgttttttgaggcaaattgtggatccgcaaatccatagtccaacttaatttgttcagcatcctttttcgaaatacttaaaacagcagagatatcattagtaatatcgcttccgccttctaaatcgatgttggcatacttaatttggccatctttaataacagttgccgtacttacgccaccaccaagatcgataattaccgaaccaaaagttttttcactttcattcaatgctacacttgaaattgctaaaggcgttggcacaaagaaattattatgataaccggctctttcaatagccttcttgatattgtgcaaaggactagtaggtgcagttaataaaattccactaacacccaaggaacgtgcaatcatttttcttggatcatcaacttcagttttaccatcaatcaaaaagcgactcggcaaaaatgtaattgcttcacgatcatccttagctgctgaatgaatcgcagatctaatcgttctttttacatcatcattatttacttcttgcccttgttcaccaacattagcaaaaccagttgcagtttccagttgtaacatccctaccggaattcctgtaactacactataaatcttggcgtttgttttttctgctacaccttttaatgcacgactaattgcactagcagtttgatcaatatctactatttgaccgtgtcgcattcctgaatttggcgttgtaactgcaccgataaccttaccagaatctgcaacaacggcttttacacttgtggttcctatatctaaacccactaaaagatttgaattctccaaaattaagcccccattaatatttgccttgaaaaaattctaacataaataaacttgcaaaacagctacgatatgccataagctttcttttcactagaagttaatggtctactaaatgcacctatttctaaatcaataaggctatgtttaccagctttaattctaatagtatcataatattttagtttgctattcaaagtagcagtattgccaatcactacattaccgtccttcattactaaaataatttgtgaatttcgtctggtattcccacttaataattttacctgatttttaaatgaattaggtaaactgttaaataactttaaatcattttttaactcatctgatttattatagccaacaaaaataggtttatcttggttcacttttgtccaaggtagagctctcgtacctatttttccattatccaaaatctttcggtaagaataaccatcttttaagtaacccacggttttacgttcattaatttgtaaaatcaattgattaatatgacctaaatgaacttgtgcactttgaatttctggatatttttgggataatctttgactcaaatctttttgttgaaacaagtaatcaaaaactttatcgctagccttgatcttggataccttaacaatttctttagcaggtaaatgctctgcaccaattattttaacagtactgatattcgctaaaggtgaaatatagtatcctaaaccagctatcgccaaaactgaaaccgtcattatcagacctagcctacgtcgtaatgatcgtcgtctttctgcctgtaaatttgagagtgaggcagaaatcttggtctgcgattttcgactattcctttgttggttaaattcatgattcaagtacggagacaattctttccttggatcaatcttagttactggctttttggccatctgcctcacctacctcctagcgtgaaatttcttccatcaccttaatcacttgatcagatgcatcaggtacgcctaaagccttagaagctttgctcatttcagtagcatacttttcatcgagcaaaatatggtcaattgaagagacaaaattatttggatttaaatcatcttctggaataaccaatgctgcaccagctttttctaaatcaagcgcattcttcatttgatgattatgagttacattagggcttggaatcaaaataacgggtacacctaatgcagtaaattctgcaatacttgttgcaccagatcttgaaacaacacaagtcatttctggcaatagacctggcatgtttttaatgtatggcaaaactttaatattattaccaatatcaacattcttaattttttcttgtaccttatcaaaataaaaagtacctgttgcccaaataatttgatatggtttttgctttagcatcattaatgacttaagcataattctgttaattgctaatgctccacgggatccaccaaatactaaaacagttggcatttttggatttaatccccatgttttttcaagatcaattttttcttcgtgcaagcttaaaacttgttgtgaccgtggattacctgtcttaactagtttcttcttttctgagaattcctttgcagcatcatcaaatgtataacaaattttatccacataatgacccaaaaatttattagctaatccaaccactgaattagattcatgaatcattgttggaatatgcattttagctgcttcataaaccatagcaccgctaacgtaaccacctgtacctaaaatgacatctggtttaaagtcccgtaaaatttggcgtgcgcttttagtagcttgtaaaaatagcttgatagtctcaaagttttttaacggatgtttacggttaaagccttgaatcttaattgttttaaagttaacaccggctgctggaacaatttttgattccaatcctttttgtgtacctacaaataagatttcatcgtttttactaataccgcgttctttcaaacgttcaataattgccataattgggtaaatgtgaccgcctgtaccgccacctgtaaaaataactctcattttatttagtctttaattcctcaacaaatctaacaaagtaatcgccacgttcttcaaatgttctaaattgatcccaagaagcacatgctggtgagaacaatagtacatcgcctggttcaactaattcccaagcacgaggaacggcctcttgtagtgtattaacaattacaatgtccttaattcctgcttttctagctgcgtcagctaacaaatatctagtttcaccataaagaacaattgacttaacatgttttttaaataatggtaccaaatcatcaaaagtgaagccacggtctaacccaccagcaatcaatacttccggttgcttaaatgatggaatagctacagttgctgcttcaatattagttgacttagaatcattataaaccttgcagccatcaagtgttgttacatattgcaaacgatgcttagcgccagtaaaggtgctcaatactgcggcgatatcatcattatcagcgcccataattttagaaattgcaatagcgactaaactattttgcaaattatgaatacctggtaatttaatatcagaaatcttcataatcttttcgttttgactttcaagatattcatcgccaatgaaataatcagcattatgatctgtctcagaaaaagtttgcattttagctggtgaaacttctttttccttagccaaaatatctttttgatcataattagcaataaagtaatcattactgttttgcgttctagttacattcaactttgcattgacataattttcaaaagtcttgtgataatctaagtggacgttgttgtaaatatcaacgatcgctgcaactttaggatcaatatcagttacacccaaaagctggaaactagaaatttcaactactaaaatatcatccttagttgccttaggtacaacttcagaaatcggtacgccaatattaccaactgcataagcatgatgaccagatttttgcaaatgatggtccaaaattctttgtgtcagcattaccgtagtagtttttccatttgaaccagtcacacaaacatagggagcatcactacaacttaaggcaacttctggttcagtaataatcgggatattcaactcctcagctttttgaaccatcggattttcatagggaatacctggatttttaactaaataatcaaaatgttctttttcaagcaaatcaactggatgatgaccgccaattacgcgcacgccgcgacttttcaattcttgtgccttagcatttttctccaaatcagctttatcatttaaagttaaatttgctcctaattgcaaaaggagttcgctaacagcaaaaccacttttacccaagcctagaaccaaaatgtttttattattataagttttaatatccttcattttatgattatccccaaattactaaatacaaaatactgccaattaatccaactaaccagaagacaatatctactttccattctgaccaacccaacatttcaaagtggtgatggataggtgtcatcttaaaaatacgcttacccgtagtttggaaagaaattacttgtaaaattacactagcagtttcacaaacaaaaacaatcccaactaacaataatgaccagggacggttaagcataatactgattgttgctaaaccgccacctaaagcaagtgagccagcatcacccatgaaaattttagccggcttatggttaaaaataaagaaggcaattaaaccaccaattacactcatacaaaaggccaaaacagcaaaattcttttgtttgaatgcgatataggcatatgtaccatatgctacaactgataaacctgttgctaaaccatcaagaccatcggacaagttaacagcatttgaaaaaccaaccagccaaaaaataataaatgccacaaataaaactaagctatggacaaccccagcaaaaggaatatataacccaaattgaaaatgatcacttgtagcaatcaagacaattaaaattgcaattataatctgtaatgctaatttttgccatgcacgcaagcctaaattacgtttgaagtaaagcttaataccatcatcaaggaaaccgataataccgtagcctaagagactgattaccaaaatccaaacaactttattcaagctgtgctgcatagcagctacccaaataacagaaataactgctgcaattacaaaaacggtcccacccattgtaggtgtgccagactttttttgatgccatttaggaccttcatcacgaatttcttgtccttcgtgatgtgaccgcataaatttaatcaacaatggaataaagatcactgtcaaaaccagtgaactaactagggcaatacaacttgccaacatcatattcattctgagttactcctttaacttaatgtttaattttcttccagcttttaattctgttcctttagccacgctttgactcgcaacagtgccggtaccttttatgcttaacttaatatctgtcaaactagcaaattggtgtaaatcactataagtccatcccgtcatatcaggacaaatgatttttcctgaagtattgacaaaaatcttagacccagactctaacttttcgccactcttaactccttgattgctaatccgatcaccgctaccaattttaaccaaattaagtcctaattgcttagtttgactttcagcttgtgcaacggttttagcttttaagtttggtacttttacagtagttgatacatcatcatttttagcaatcgaaatgattctctgcatcatcggtttgaaaattgaagccaaaatcttttcagctccgcctccaattaagtgtggttgcttaattgtcaaataaatacagtaacgtggtttacttgctggataaataccaacaacagagaaaatataattactatcaccctttagataacctccacctttagggttagcaatctgcgcagtccccgtcttaacagcaatatcggcgtttcccatcttataagcagaaccagttcctgattgcttattaagtacctttctcatgttagccacaattacttttctggttttagcactatatactggagtaccaacttttttaatctgatagccttgaattgtattgccatcagagtcagtaattttattaaccaactgtggctttaccatttgaccattattagccaaagaactataagcttgcatcatttgcattacattcacagtaacgccttgaccaaaagcagtaattgcttggtcaactggtgttttaaacgaaatcatccccggctgctcacctggaagactgactcccgtcttttcaccaattctgaacttcctcaagtacttcttccaagtcttagcacccatcttttgttctaacttaacaaaaccagtgttacttgaacgttcaaaagcttgagaaaatggaattgtgccccaacctgaagtcagccagtcatggatagtcgaaccagcaatattaacagaaccagaccggtaatactcattagggttgtaattgccactgttgactactgcagcgaatgacaaaatcttgaaaactgatcctggttcataagtatcttggaccaagatatcccgatacgacttagttaatcccttcatagtttgaggattaaaagtagggcgttgagaagttgccaaaattttcccagtcttcatgtcttcaactgtagcagtaattgatgttggtcggtaagttttctgtacttcacttaagcgagtctcaagcaaactctgcaactgagaatctagtgttaaatacaagttgtttccatttttagcaggcttataaacctgattactatttggaagctgatattcagatgcatctaccgaagaaatccggtaaccatctgtcccagtcaaagtcttattgaaataggcttcaattcccatagttccgactaagttttgtgcattagtctttttattccaaattggttgagccaatccaacagtatgtgatgcaaaaacaccattgggatacaatctagatggtgtttccaagaacttaattcctggtaatttcattgcttcaatctttttcttttgccgcaatgtcagtccactaccacctgtcccaaattgtacctgaaagaccttctttttgggggttaaatattggtaaattttttccgcagacaatggtaaaacctgtgccagcttttcagctgtcttggttttattcactacatactcaggtttattcttatagttgatcgaagtcttatctaaaatcgcataaaccgtatacaaatgcgaatcttccgcaattgttaatccatttcgatcatagatagtccctcgcgtggccttaattacctgattgcgcttataaagctgcttggtacgctgtgataaattttgaccattaactgtcttggatattccgatatataaaaatctagccgtaaatacaagaaaaaccaaagccacggccatttggagaaatctccccaccgtaaagcggtagccgtgggctttggatttttgtaattttaaattactgttttttttcattaacgaatcgtcctaatatttttgttaattagagttaatcctttttcacgtgcaattttatttaaacgtgaagtagaggtcaactccccaatctcttgacgtaaatcggtaatcttattctgttccttagcaactgtttgttgagttctagtcaattcatgttgagccgaagttgcagaaatactagaagaaactagaaagatcatcatgcccaacgtaatgacgcttccaataatcatcaaagctttttctatgccactataaggaactttacgcggatcaaggataattcgttgtcgtctttgcgaaccatttctactacttggttcatattcaatttttcttgctgagctatcagccataacattttcctctttataacttctctgcaacccgtagttttgcactgtgtgagcggttgttgttctctaactcagaagtagaggctacaattggtttgtgatttaccaaacgtagcgttggcttcataccgtccggtataaatggcattcctcttggcacctcaacttctgaatacttcttaaaaatccttttaacgatcttgtcttcatgagactgaaacgtaattacactgattcgaccacctggacgcaatatcttaattgcttcctctagcgaagcttgtaaaacatcaagttcgtgattaacagcgacccgcaaagcttgaaaactcttctttgccgggtgccctccagtccttcgtgcatacgcaggaatcgcatctttaatcacatcaactaattcaaaagttgttgcaattggcttttcccgtcgtctttctacgattctgtgagcaatttgacgagaaaacttttcatcgccatattgatacaaaatatctgccagttctttttgacttaaagtattaactaactgataagcatctaagtcctgactttgatccatcctcatatctaatcgcgcatcataacgatatgaaaaaccgcgatctgcttgatcaaattgaggggaagatacacctaggtcatagtaaatgccatctattccatctgagtaacccagttttaccaggtccttttccagattactaaagttgtcatgtaccaattctaaccttggctcactatccagttgtaataaattcgcaaagttcaacttcgccgattttatcgcatattcatcttggtcaaaacctacaagcgtaccggtgtcaattttgctgagcaaatatttagcatgtccaccaccgccaaaagttgcatctacataaagaccaccgttttttggtttcaaattgtcgatagtttcgtgtaagagtacactggtgtgtttgaatttcatattttttatagttcaatgtcgtccaaattttcagcaatatcatcatagtcttcgttagcttcttcttcaaaactagtccaacgttcttttgaccaaatttcaattcgatcagagacaccaatgatgacacattctttaatgagtttggcatgcattttcaacgttgttgtcagattaacgcgaccttgcttatcaaactcacattccatcgcaccagagtagaataaacgcataaatttacgtgtattcctcttagtcaacggaagttttgctaatttagcttcaatcttcgaccactcctccatcgagtagccaaaaatgcagccttccattcctcgcgtgaatatcatcttgtcgccaatctgatcgcgaagtttcgctggtataatcaggcgacccttgctatcaagattgtggtgatattcacccatgaacatggtctagcccccttccactaaataatttaccacaattccccactctctaccacattcataagaaaaaaatacagatttttaaatttcttttttattgtgatttttcaaaataaaaaaaagtcacaaaatattgaaattttgcgacttaagcatatacaagtaattttattttataacactagcatcaataaaagtccgatataccagaaaacagtacaggcagtcaaataatcccataattttctaactgtttttcctaaagaaatatttttatttctaatcgcatcgttcagcgacacaacaatcactaatacaaaatagcataaaaaaccataaggtaaaaaagaaggtttattcatatgtaaagtaattaatccacaagctgaaagaaagaaaaatggcataacatcgtaccctctaaactgtgctttagggaaaattttattgataaaaaaagcaactactaagccaataattggaattaggaaaatataaagcataagtattcctccattctttttattctaaactataattgatttgaaaaaaaccgttaataagcataaaatattgttcaaataggagggctgtttatggcacgaaaaaagaaaaagaaatcaggttttcaaaaattaactattgcaatggcttggatcatggcaattattactttagcagctgttattgctcaagctgctatctcacttcaaagtttttaaggattaaaaagacgcgaaagaaaaaatcttccgcgtcttttttaaactcgataagcgtttaaatcaattaagaatggataatcctgagctaaattgccccaaatccaatacaagagaaaaaagaagacaactgcccaacctaaactgactaaaatgctcattaataatacgtgtgctgatgcagcactaatacccaccatattaaaaatgagccaactatacgcaacaaaaactgcagttcctaataaaacgacaattaatctagcccataacatttccggtaaaaaacgagctgttttttgacagatccagcaacttgcaggtaggaaaactgtataaacaccgataatgccataaaaatagatatcagcaacaattcctgcacctaatgctaaccaaatttcattatcattagtatcatcaaacagaccaatcaacattacactgattggcaaaatgacgcttgacgctgcaaagttgtcataagtcataaactgatgtaagtaaagtgcacatacaccgtctactaccaatgcaataaataagccaattgccaaaacccattttcgaaacgtagacattaattagccacctgtctttcaattacagttacaacagatggatcactaatatcacctgctggtttaattctaatctgatcagatagaccaaatgaatcacgagttgtcgtagtaactgtaccaattaacaagccttttggtgagttaccgcccataccactagtatatactctcgtgccggccttcagtttgcgaccatcaaccacctgtgtaaaggcaagataattattggaagtaactgtaataataccatgtactgtttttccattcgcagcatccgcttgaacagagaagcgattagccgactcatcagtagtagtaagtaattcaaccttggaagaagcagcatttgcttctacaattcgaccaataacaccgccatcgcacatgacagccatattctttttaattccagctgaacttcctttattaatcactaataaatctgaccatgtatcaggcgaccgagaaataacagaggcgttgaccatggtatagccacttaacgtatcttttaatttcaatgcagacttcaattgcctattttctttttcaagagctgaattgcgagccttcgtctggcctaaattagtaacttctcgctttagatgattgttttcttcttgcgtatttaaaatatcatgaacactatttaatccgcctgacacgagccctactggtacatcaacaattctagtacctaaagcaacgacatcgttacccaagctttgaatcagtaaaggtgtattgcgcctattgcgcaagctaacactcccacccaaaacggataaaataacaactactataataaatgctgataataactttttattttgcagaaattttttcattaagaattgatcctatagaaaaaccggcaacagccggcttttttattatttgcgacttctacgcattacttcaatattcttgagtgattcaccagtaccaattgctacacaatcaagtggatcttgagcaataaacacaggaaccttagttgcttcagaaataacttctggcaaattcttcaagagtgcaccaccaccggttaaaacaataccatgatcaataacatcggcagcaatttctggtgaagtttgttccaaagtctccttaatagctacgataatgtcttgaactacatcttgaatagccttggcaacatcaactgcttcaatatcaacagattttggtaaaccagttactaaatcacgaccacgaatattcattgattcaatttctttagccttttcaactgaagctgaaccaatttgaattttaatgtcttctgcagttctttcaccgattaataagttaaagtttgagtgaacatagttaacaatcgcattattaaacttatcaccggcttgacgaattgaagttgatgaaacgattccacctaatgaaattgtagcaacatcagtagtaccaccaccgatatcaacaaccattgaaccagtagggtccataactggaagaccagcaccgattgcagctgcaaatggttcttcaattacaaatgcttcacgagcacctgcaactctagctgcatcaattacggcacgcttttcaacttcagtaacacctgaaggaacacataccattactgaaggcttggaattaccaacagtcttttccataaaatatttaagcattgctgcagtagtatcgtaatcagcgattacaccgtccttcattggacgaatagctacaatgctgcctggtgttctaccaatcatttcttttgcttctgaaccaacggcgattacttcgcctgtttgtgtattctttgctactactgaaggttctctaagaacaatgcccttaccttccatataaacaagtgtattggctgtacctaaatcgataccaatattctttgtacctaatccaaacacaaaaatctctccttaactgttgcggtctctaaatcttgactaattatagcatactataactttaaaggcgcctttcacacaaattttaaagaactttaaaacaatttttctcacgcaaacttaaatattgaccttctcccacgataaaatggtctaagaaatcaattttcatcatttttgcagcttgacgtaaactttcagttaattccaagtcacttgcagatggcgttaatttaccactaggatgattatgagcaataaaaattccagagcagccataaataactgcccaccgaaaaatttcccgcggatgagcaattgatctattcaaagtcccttgaaatagtttcttctcagcaataatgtggttgctattgtcaatatacaatgcccacaattcttcctgcttgtgtcctatcagcttatcagctaaatacgtacctacttcaatgctagatgtcaaaattgtctttctcttaggtgaagcgcagcgcaaacgatctagtactgcctcagccgtaatagcaagttcatccgagcattctgaactggtaataaactttaatagatcattaaacgaatttaaccctgtgtttttcagaaaaacatttaagtcctgcaacgtatgaattcctttattttctagttgttcaaataattgtgtcaatagctctaaatctgttttgacaaagtaatgatttggttttctttttaacataaaatccccctcattacttattacgcaaaaaagagctaaatttttttcagaaattcaaaaaagttttgacaaatcatcgttgcattctgcttatctttaacagatggtgctttcaaatctggtaccatcacacattttaaccctgcattagcagctgcttgaacaccggttgatgaatcttcaaaaactaaaatattttctttaggtaaattcattttcttagctgcttctagataaatatctggtgccggcttagccttaatgtgacctctttgtacatcaagataactaagatgaaaatcaaaataatttctgattccagtcacccacatagcatgctgaactacattttcataattacttgaagcaatcgccatcttcaagccacgcttttcaaattcgtctaatgcttcttgaacaccaggttgcagctttaactttccctcatcagtccattgccacaccaagtcatcagttcgcttaataaaacgatcacggtctgcttcagttttaaaatatttatgataaaaatcctgcatctctttaactgtagcaccagttaacttgagataagcatcccgcggcgtgcccaaattctcttcttctgccgcctgaatattagcatcccaatacagcttctctgaattaactagcaaaccgtccatatcaaagataatgccttgaatatcatcatctagcccttgtacgcgcatcacgttttcctttccaatttaaaatagcactaaccaaataaaaggatccactaacaattaaaatatcattagctcccaagtgatctcgcagctgggtaaaagcagctcgataatctttttcataattatatcttttttgtacatcaattggaaaatcatcttttttagctactcgcggataagataaagttgtcagtaaaacttcatctttatcatcaaacaagctaaacacctgctcaagatccttatctttcatcatagtcactaaagcataaagcttgccatgcttttgctgggtcatacgatgaacgactgccagcaaattactcattgcctgaatattatgtgctccatctaaaatgattagcggattttctcgtaaaatttgatagcgccctggaataatcgtttgattaatcgctgtttcaacttcttcatttgataaaggcagtttcaacaaaaagaacgcctggcaggcaacggcaatatcataggcttcaacttgtggtcgtaaagcaaaaactagctttcttttgtgatcttgataaacaatttgattatcaagcaaaacactaaagtctcgtcctaattgataaactatcgcatgttcttcttcggctttacttttcaaaattggccaaacaacttctggcacgttacctaaaactactggtctttttgccttaataatgccgcttttctcacgtgcaatatcctgaattgtaggtccaataattttttcatgatcgagaccaattgtagtaataacacttacttctggcataattacattagtcttgtcatgttctccaccaattcctacctcgataacagcataatcacactttttttgagcaaaatagacgaaagccagtgcgacttcatattcaaaggttactaacgaaaaagttgagtcctgctgctgcaatttctcataagtaccctgcacaatattagctgttttaactaaatcctgatcactaatattttgattatttaactgtattctctcattaaattcatagacatacggtgagacaaaaaggccagtcttttgaccagccttttttagtaggtttgataaatagtatgaagttgaacctttaccattagtgcccgtaatgtgaatcgttttaactagatcttgaggattgcctaattccaacaataaccgcttaataaaagacaaattatttttaggatgtaaatgaggcaaagcatataagtaatcgattacttcttgagctttagtaaatttcaattatttactctctttcaaatcttgaattctttcacgaacaccggctaattgactttcgtagtcagccttcttttccttttccttgttgacaacagcttctggagcgtgaccaacaaagcctttgttagccagcttcttttcacaacgagcaacttcgtcttcaagacgcttttcttctttttccatcttttctagctcatcgtcaacattaacaagttcagttaatggaacaaaaatttgtgcgcctggaattacagcagtcttagctaattttggtgcttcaacttcactagctacagtcaattcctttggatgtaagaagttttcaacgtaatcagcattttcgtccaaaacgcgcttgttagcttcatcgtctaattgaatcatgatgtcgatttgacttgacattggtgcattaacttccatgcggatgttacgtactgctttaatagtttcaattaagaaggccatgtcttgatctgcttgcttgttttcaaattccttgtgagtagttggatattcagcaaccataactgacttaccttcatgtggcattgaaagccataatttttcagttacaaatggcataattgggtgaagcaaacgcaagatttggtcaagaatccaaattaagttttcttgctttcttgcctttaattcttcatcgtcaccattcaaagcaaccttagaaatttcaatataccagtcacagaagtcattccaaataaagttgtaagcttcacgaccagcttcaccgaattgatattcatcaaacaagcgagttacttcactaacagtatgattcaagcgatcgaaaatccaacgatctgataaatcaaatttagaagcatctggcatatgagctggtttagcatctgctggcaagttcatgattacaaaacgacttgcattccaaatcttgttaatgaagttccaagcagcagataatttcttaggatcataacgagtatcttgaccaggagcagtaccattaagcaagaaccaacgaagggcgtcggcaccgtatttatcaactacatccattgggtcaacaccgttaccaagtgatttactcatcttgcgaccttgttcatcacgcattaaaccgtgtaaaacaacatcattaaatggacgcttgccagtaaagtgcaaactttggaacatcattcttgatacccagaagaagataatatcgtaaccagttaccaaggcattagttgggaagtagcgcttaaagtcttccgcattagtatcaggccaacctaaagttgaaaatggccataatgcacttgagaaccaagtgtcaagtacgtctggatcttgttcccagttttcaatgtccttaggtgtttcttcacctacataagtttcaccagttttcttattgtaccaagctggaattcggtgcccccaccacaattgacgtgaaatacaccagtcgtgaacatcttccatccagtgatcaagagtttgttcaaatcgttctggaacaaagtttactttgccatcagtcttttgattttccaaaactttgtcagcaagtggcttcatcttaacaaaccattgcttagaaagacgtggttcaacttgaacgccagaacgttctgagtgacctactgagtgaacaattggttctatcttaatcaagtaaccttcttctttaagatccttaactaaggcttcacggcattcaaaacgatccataccagcatacttgccagcttcttcgttcatcgtaccatcatcgttcataacattgattctttcaagattatgacggttaccgacttggaagtcgttagggtcgtgagctggagtaatcttaactaaaccagttccgaattctggatcaacgtgttggtcttcgataattggaatgtgacgaccaacaagtggcaagatcaattctttgccaacaatatccttgtagcgcttatcaccaggtgctaccgcaacggcagtatcaccaaacatcgtttcaggacgagtagtagcaatttctacataacctgaaccatctgcaaatggatacttaatatggtaaaaggcacccttatcatctttgtgaataacttcgatatcacttaaagcggtttgaagtgctggatcccagttgatgatgtattcaccacgataaattaagccttcattgtaaagctgaacaaaaacctttttaacagctttagaaagacccttgtctaaagtaaatctctctcttgaataatcaagtgaaagccccatcttagcccattgacctttgatgattgatgcgtattcatctttccaatcccaaacctgtttaacaaaagcttcacgtcccatttggtgacggtctttgccttgtttacgcaattttgcttcgaccttagcttgggtagcaataccagcatggtccataccaggaaggtaaagagtatcatagccttgcatccgcttaaaacgaattaaagtatcttgaattgcagtatcccaagcgtgacccaagtgcaacttaccagttacatttggtggtggaataacaattgaatatgggtgagcttttttgttacctgatggcttaaataaatcttcatcaagccaggtttgatatctacctttttcaacctcgtttgggttgtatttaggtgctaaatctgtcataaaattcctccaataaaaaagtcctagacatattgtctaggacgatcagttaaaccgcggtaccacctacgttaagcatgtatcaaacatgcttctcttgaagacgataacggcgtataccggattaacctactttttattttcaattaatcagctaatcaagctactagtcaaccttcggcctctcagctgtctggcttttctctgttaataaagtcgacccctcttgattcttgctttggttatgattatagcatgaacttcactcagaaaaaagggttaggaattagtcgtaattaagttagccatatgtctttattcttttaataaatcagcaatacatttttccgatgaatgatattgcttatattgttttaacacgttgattaaatcatcatagtgactattccaaaaataataattttcatcataagatttcacactcttaagatcgttataatactgcttaacaaaatcactaggcttcactttacttttatagttatttgtatatcgctgatagtcttgatgataaagaatgtctagaatttcaatctcaggtctagtacgaagttctactacttcggatactttctttttatacacttctggaagattaaacttttcggttttggaatcaagtatcctataaattttaacctttctacttctaaaccctttattcaaaaattctttagcaaactttttagcatttcgtgctctaattacttcaccttcaagaagatcatcctcgttgaattttagtgcatcgtgttccaatagaacttccataattgctcgttcagtatgaccttctacaataatagcgattagatctgtagagttactcatccattttaaccgccttttctgtagccttctttaaagccatgtaggcatcataatctggagctgtcccacctaaataatctgattcaaaaacatcggctttatttagatcgcttcttacatcagcagttgaatatctttgaagctgaatcttgccttctctcttagtaatatattcttcatcagttctttcaattttatccaaaatttcagtatagtgcgtactaaataccaaagtagctctatttatgttgattttaggattagtaaaatactcaataaaagaatctacaatagcgtgattaaagtgattctccaactcatcaataaagatgatgccaccaacggaaagtgcattaattacctcgccataaagagttatccctttagctgtaccagaagacaagtattttgcaatcgttgtaaaatcattttctgcaatctctgtatctttccctttaaacttcagcttaaacaattgtttagtagcaccagagccctcaggcttgttttcaattttaagatattcaattgttggatctaaaaagtttaaaatttctccaggcacattgccagaaccatacatcaatgcattaaagtcagtaaagaacaaagtatcaaatggtatttgaggataatacttatttttcgaaataatcgctctaaaaatcgaatcatcagacgacaaaattgaagaagctaggtcgcctaattcttttctgtctaattctggttttatatttttgaaatcaaataattttttctttgaaagattaacagttaccttttttcgatataccgtttcagactcaatatgccagcttttacttaaagttttctttaacttgaaaactaaactatccttataaactacatgatcagttccataaaaataagttgtaacactaataggctcatttcctattagcacatccgttagcttagtttgatcaattgacttttccatcacaactgtttgaagaattcctatcaagagtttcatgatcgtagtctttccagtagcattagtccctactagagtgattaaattattcacccataaactgccgagcaaatgagttaatcgatcagaggtattagaagtaacccttgcatcactgaccagtgaaaattcaagatcatcctcaaatagcggatgattttgaatttctaattttaaaaagtataatttatttttattcataattattcacctaaaattgttttattcaggctaaattttatcatatttttgcattttatacataaaatctgtttaaaatataaataatcctcatcaagtagttactacttcatgaggattatctaaaatattctactttctaatcatcttaactgcttgaatcaaaatcgttggaatcagagccaagccagcaagccacattacttcttgcccagttaacggagtaactgcaaacaagctatgtaacgccggtacaaacaaaatcaaggctaacaaaattgttccgacagcaaatgctgctaaactgtaccagttatttttgaaaccgatcttgaagatactgtgttgtgaacgacaattgaagccatgtaaaagccgagcaaatgtcaatgttgagaacgccatcgtcgttgcaactgcaggactatcttttagtccgatcaaaaaggcagcaattacactaatcgaaatcaacaaaccttgaatagtaatttgactcacaaaggctttgtccaaaataccagccttaggatcacgtggcttacgtttcaaaatatctggatcacctggctccattccaattgctaaagctggaagcgaatcagttaccaagttaataaagagcaattgaaccgctacaaatggtactggtaagccagcgagtgaagcaaataaaacagtgataattgctgaaaggttacctgataacaagtagccaatagcgtttttaatattttcataaactgttctaccgttagcaacagctttgataattgtggcaaaattatcatcggccaaaatcatgctggcagcatctttagatacttcagtaccagtaatccccatcgcgacaccaacatcggccttcttcaaggctggtgcatcgttaacaccgtcaccgatcattgatacgatacgatcttttctctgccatgcattaacaattctgatcttgttttcaggcgatacacgagcataaaccgaaatcttctcaatgttttgatcaagttcttcatcgctcaaagcatctaattcaaggccagttaaagccatgtcaccttcattgaaaataccaattttcttagcaattgcaacggcagtcaccttatggtcaccagtaatcatcacagtcctaatcccggcttccttagcacgagcaactgcagctacactttcttcacgtggtggatccatttctgaaacaaggccaataaaagttaagccatcttctgcttcagtagaaagctcttcatcactttctttataagcaaaagccaaaacacgcaaaccattttctgaaaagtaattgttttgtgccaaaatttctttacgatcttcttcagtcattggacgaatttcatcgccgaaacgaatattgacacagcgtttcaagagcacatcaattgcacctttaacaaaaatagttggtacagtatgaatcaaatgcttagtactcatcagcttacgatctgagtcaaatggtacttcttccagacgcttagaatgttcgcgtaattcttgttctgataagcctaaaacaccattacctaagtcaattccgggcacttgacgatacatttccagcaaggctgactcagtcggatcaccaattgccttatcttcggccaaacttgcatcgttgttaagcactacatcataaagcaagtagcggtgaagttgattactcaaatccagctcatttggctttaaaactttaccaccaatatagatgtcctcaacagtcatcttattttgagttaacgtaccagtcttatctgaacaaattactgatacagaccctaaagattctacggctgccaagtttttaataatagcattttctttagccattttttgcgtacccattgcttgcacaatagttacgatagaactcaaagcttcaggaattgcagcaacagctaaagctactgcaaatagcagtgaatcaagcagcggttgaccacgccacatttgaataccaaagatcacagcacacaagattaaaatagcagtagccaatcgtgatgaaaactggtcaagtgatacttgcagcggagtgcgacgttccttagtttcattcatcaaggaagcaatcttaccaatttcagtctgcatccccgttgccgttaccacaaccgtagcacgcccataagttactaaggaactggagtaaaccatgttaacccgatcagctagcggcacttctttttcaaaatcagtgtccaacttgtcaacattagtcgattcaccagttaatgaactttcgttgacttgcagagaataattttctaaaattcgaccatctgcagtaactaagtcacctgcttctaacaaaagaatgtcgccaggtaccaagtccttggcctcaatctccattttttggccattacgcaaaactttagccgttggcgcagataatgactttagcgattctagcgacttttccgccttaacatgttgtaccgtacccaaaatcgcattcagaatcaatacaacaataattaccaacgtactttccagactgcccgtaaaagcagaaattattgccgcgataattaggatgatcaccattaagtctttaaattgttctaaaaagacctgaaaagtaattttcttctttccttcaactaaagcatttggaccaacttgagctaatttctcttgagcctctttagcgctcagcccctgctttaaatcggtatttaactctttagctatctcgtcttttttctgacgatagtattccatgtaaagccctccctaaacataagagtaatttaagcaaaaaaatagagactactggctaaaacactgtttagtcaatagtctcatcatttaaacttacagcggaaaataaatttcgttctgacgccgtaaatacaatttatgccgattactccctatttacttgtacataattaaaccatatcaagtaggtagttggcaagctattttaactttcttttaggaagttttctaattgttcatcggtaaaatcagaaccgtaattttgttcaaggagatgcatgatctcttgcttggtattaccagttcttttaagtgaagaaactaaaattttgacgcctcgtttaagtccctcttctttaccttcctcacgtgcgtcttgttctcgctccagtattttctcttcgtagtccatgatataatcactccattccgagcaataagataatcatttgtacttcttatctttcaataatccgttagcaatatcagccgaactaactggtacaccgactaaacgctcatttttccacaaatcaaaaaaatcagctggcatcatttgatcaaattcatcatctgaattcattaaatccttataaacacgtgacttctcaaataaatttagagcctgcttaggataaatgtttaatctcttagcaattaagtcgctaattgcttcagctagttgctgatgaaattgcttttcactaatttcgggaatcatctaaccaactccttatctatgaacgttaaagctttgagagctctttctgtcttgaaacaatactgctccgaataaacactcggttttaattttagcagagcctcatctaaatctagattaccatgtttccagcaattaacaacagaaaaaagtttaccatctgctgttgggccaatgacgatatcagaattatcttttatattattcattctattttgaatgacaaacttaatccaatcaatatctgcttggtaaactaatattttcaagtcgggttgatcagcatcgaatacatatctatttaatgtcggttgacctgaatatctagccttacgctttgcccatttttctgcttgtctacgattagcagtcacataaaagccattaccaaaatcagttgtaaaaacatttttatttatacgaggctgataaacagcctgattgcttccatgatacaaaatgactttggtattgcttttcatgaatcgtgatgtatgcgtatttttcatcgcgcacctctttcataaatagtaggacaaaattatcctccactatttattacgcaaaaaagcacgatttttttgtgagaaattaaaataaaaaaagaaaatgcctgagaattatatcccagacattcaccaatttacggctctttctcatttctcttccttcacaatataaattggtcgttctttaacttgtaaatagattttaccaatataacggccaataattccgatacacaaaagctgcaaaccgccaatcaataaaataattgaaattgtgctggcccagcccaaaatacttgaaccaggaactattagtttacgaacaattacaaaaataagaccaataattgacaaaatgaatgaagttatcccaatccaaacagctaagttaagcggtgcttgagaaaaatcagcaatcccgcccaacgcatatttgaataatttgtgagtcgtccaatcagtttcaccagctacgcgctcgacattgtggtactcaagatacttagtcttaaaaccaacccaagcaaaaatacctttagaaaagcggctgtattctttcattgataaaactgcgttaaccatctgcctggtcatcatgcgatagtcgcgtacgcctgaaacaatttccactttagaaatgcgattaatcaccttataaaattgattgctcaagaaagacttaaacttaccttcccctttacgatctactcgtctgcagccaactgcatcatagtcaccagtctgcaaaattttatacatttttggtaaaagtgaaggcggatcttgcaaatctacatccattaagacaatataatctcccgttgcagctgataggcccgcatagatagcggattccttaccaaagttacgagaaaaagaaatatagtgaacatgtttgtcctgctcatgcaattttttcaattcggtcagtgtgttatcattggagccatcatctacaaaccaatattcgggcgtcactttgggcattttagctaatactttttgcactgctggataaaaaagtggaattgtttcttgttcattaaaacaaggaaccacaattgataatttttccattagatttcttctttcttagcttttctaaaagtaactactttattaattacaaattgaattaaagttgctacaaaagttgctactattttaacgattaagtgcggataacccaatttagtaacgaaaataaatagggaaaccgtagtaaataccgtggtaatctgaccaacgataaaataagaaataaatcttaatatcatgcgatcatgaactttaaagttagtataagaattccataaaaagttattgatgatcccgcaggtagacgaaataatgttagctatttcaacattcatcttgaaatgcgtcaaaattgtataaattccaaaatcaacgactagccctaatacgccaattagaacatactttactaattgaacaaaatcttctgaatagattgctgttttgattttttccataattattcctaataaaaaatccagacaagaggtcctggatttcaacatatttaactaatatggtcttaattatatcattgtttttaagctctacgttttcattattaaagttaaaactttaataggaacaccttttgcattaattataatttttgtcattcaatctatctgtcttgttagtatcctcatacaaatgataggaactcttaatcttatgcctgccttgtggatcaaacatgcagagaaagataacatagcaacactttaaattttgatatgtgctgcatttcaaaatcatacagatttccatcaacatcctcaaccaaaatatcgagaataacagctttttgcttagggtgtttgggatcagcgacctttctctgcttctgcagataatgaatatctctaatctcaatctccggcaccagtccctgtaggacatgcttgcaaaaattcttgttagacataatctcaccaaagattacatcctctgtgaagccaaaccagggcttctttttcttgtgcgtattttccattgcgcacctctttcataaatagtaggacagaattatcttccactatttattacgcaaaaaagtgcaatttttttgtgagaaattgaagttttttaaagttttacccaactatatcttccaacttcaattccagatattctccccgctttaagttagcaggcaagcttaactttcccatcgaaattcgctctagctcaacgactttcatccctaccgcaccaaacatacgcttgatctggtgatatttaccttcacaaattttaatttcagttgtagacctatcgtgctcttcatcctgggataatatcttcaattctgctggctgcagtttggtcccatcgcctagtgtcattcctgaagcaaaagttttaacagttgcatcattagctacaccagcaatttcagcacgataaactttatcaacatgcttaccaggtgcaagcaattcatgattcaactgaccatcattcgtcaaaaggagcaagccagtagtatccttgtccaaacggccaactggcacgattccttgataacggtcctgcggtgcaagcaaggaaatcaccgttggctgattgcgatcttccgtcgctgacaaaacacctttaggtttattcaataagaaataatgatatttttgataagcaacagcatctccgttaacggtaacctgatcgctttctttaacttgctgctttggcgttttaacaatcacatcattaaccgcaacaattccttttttaattaattggtgtacttcttttcgtgagccaacattcatattggccaaatatttatctatgcgcattatgtctttctttcgttcttatgtgttgattaatattaattatataagaaagttaacccaatttcgaattgcgacactaatcaaaaacggtcgattttgttttcgaccgtttttacgcgcgttttgcgcgcgattatttgcttaaaatatattttgtagctctgccttcacccattcttctaatataaccttgtttttctagttgccgcaaaatcttcaaaactttcgtcctaccaaacttactcatttggctaatttgcttcgtagtatccgcaccttcatgaattatttgatatactttcttttcatcattagacagatcgtccgtaataaattttaaaactggcaatattatctttatcgaattatcaaaaatttcaaactgcggttgaaccaaactacttctataagaatcatttattcttcttacacctgtaccaaattgctcaattaatcctaacctaaagaaaacattagcaataattggattacgcaaaatggaaatctgacctgaaagatattcttctttgctaagtccttgtggcaatccacctggagatactacttcaattctgtcatcatacatagaaattttaatttgcgaattaatgttccaaactcgatgaactaaggcattggctattgcctcacgaaaagcttcttctggaatctgacttacaatatttcgcgttgctccctgtatttcttcatgttgataatattgacgatatttttgaattgcttgcttatactctttaagaatagattcatgctcataacttgctcgatcaagcataatattaatgctttcaccaaaccgaacaatatcaattccacgataattatttttgtctgccaaaagctcaccggcattagtgtaactagtatccttacgctctaaattaagcgtaatcaatatatcagatgttaaacttttaattcctatcttttcttttaatgcttcttctaaaatgttaaatgacaaattttggttcatcgcggttaaactatcataggttctattttcaccaattaagattaactgtgataattcagatcggtccacttcgatcgaagcactgtcattactcttataggcctttgatttgtataaatatggaggattaactccttgctttactgttaaagtaaccacattagttttaggatcaatttctaaattataatctggatttggtttgatcgaatcgttgattttattttcaacatttaaacaaaattcaactggatttttcacaccaacgattgatccatcatcctttattccaaatttaattttgccactgccataatttgcaaatgcactaaccgtttttagaaaagtattcgtcaatttctctttaaattctaaatttttggtttctctcatttaggtcaccgtttctaaactatttagttataattatactctttcacgcgcaaaaaaacggtcgaaaacgaaatcgaccgtttttacgcgcgttttgcgcgtgcctattatattaactttaaatcaatacataatactactagaagtttccatattaacaccatatctttctaaataattaaactgtatcatattaaatttcaaaaacaccagtgaaattaatcctctataacaagtcagcgtcttcttgagctttatcatccaagaatttttcatttggataaattggcgtaatctcaataccagccattgccctttcaatcaggccttcaacgtcaagacgagcttcatattcacgcgctttttccaactttggcttagtcttaggacgcggtggagcaaaaattgtacaacaatcttcaaaaggttgaattgataaatcaaaggtaccaatctcttcagctttggcaataatctccgttttatccattgttgcaactgggcgaataaccggagtagtagttacatcattgatagccaccattgattgcaaagtttgagaagcaacttgaccaactgactcaccattaaagatagccaagccgccacgttgtgcacgaatgcggtcagcaagctgcaacataaaacgacgttgcacagtcatcaaatagccttctggcagtttttccttgatcgtttcttgaatttcagcaaacggtacggcaataaaattaatcttaccagcgtagtttgccaaaataccagtcaattccttagccttagccaatgccttttcagtagtgtaaggtggactaaagaagtgaaccatttcaatatctactccgcgcttcaatgccagccatgaagcaactggggaatcaatcccaccactaagcatcatcacagccttaccagcagtaccaacgggcatcccgccaacaccatggagcaactgattagaaatataaacggcatcttgacgaacttcgattctcaagaccaaatcaggatgcttcatttcagccttcaagccatccatatgatcaaacaagtagtcaccaactagattattcaattgattagtgtcgtattcaaacttgtggtcactacgcttggtattaaccttaaaagtcattcctggcttaaaagtctcttgcatcaattccaaagaagtcttttcaatatcttcaagagtcttaggaatcttaattgctggtgagtaagtttgaattccaaataccttcttcagacgttggtcaacatccttgaatgatgcgccattcaggacaatgtgcatccgatcatgacgaggatgaaattcaatttgtgggaaatccttaagaactttttcaacgttacttgctaagcgattgatgaagtcctttctgttcttccccttagttgaaagctcgccatagcgaaccataacttctgtgtattccattaattttctcccaaatgattaattttagcaaaatgattatagatcttgtcaaagaccttaataaattcatccgcttcttgaagcgtattcgtctcatcaaaacttaaacgaattgcactagtagcaatcttatcatcaattcgcatagaaaccaaggtgctagcctcatctgccgtctttgatgcacaagcagaagtagttgaagtataaatatcttgatcttctagcgtatgaaccaaagtttcgccccgaattccctctaaagcaaagcaaagaatatgtggtgcaaagccatcgcttactggtgaaaaaatattaatccctggtttatcttttagataatcaacaattttagccttaatttctgcttcacgcttggccttttctggttcatcttctaaaagcaaacgaattgccttagccattcccgcaattgcaggcaagttctcagtacctgaacgcaagcccttttcttgaccaccaccatcgtgtaatggggtcagcatcttgccttcttttttatataaaatacctataccacgtggtgcatggaacttatgcgcagataagctcgagaggtctactcttggtgtaaaaaccttatcccaaatatttttgccaagtgcctgaacgttatcaacatggaactgaatcgttggataattttcaagcaaatcgctaatctcatcaattggttgaatggtgccaatttcgttattaacgcccatgattgaaaccaaagttgtatcagaatcaatcgcgtttcttaagtcattaacgttaactcggccttccttatcaactggcaatctggtaacgcgccaatccaaattctctaacgcgttaaaactattggctacagatgcatgttccacgctagaagtgataatatgcttaccaaattcacgcttttgaattgcagtccccttaattgcggcattatttgattctgttccaccagaagtgaagaaaatttcatgctgcttagtccccagcaaatcagcaatttgtttacgtgacgcctcaagcaattggtgtgcacgatcacccatcttatgcaaactcgaaggattgccccaaatattagtcgctactttattgtaagtatccaatacttgtggatctatcttcgttgttgcactattatcaaaataaatcactatcattaccccttcatttaaaaaacggtcaatcgcttgaccgtttcaagacttttcaattttagcttaaataatgaatcgcttcaattaattactcttctcttctgaataatatgcattttcaagtcgttgataactacctggctctaccttttcaattgctgtagcaattgtatcaagggcttccttatagttatattcattatatagctgcattgctgtcttttgtgcttgcgcaattgaatccttatctgcatatttatttgaatactgcatcgtcaattcaactaggttagcggaattaatgatgtcatctgcttcacgtttaagccgctccacatcatcagaaatttgaattaattcagctgagatcttttccatattaatccggacctgacttaattcgttgctgacatgaccaatctcgttgactaccaaagtgtacatttggacaaagctatcaggattgccaggcaaatttcgtctttcaagtcgacgataaactaatgaaacttcttgcttaaagcgcttgattgaatcattagctacattttcagaatcataaagtccatcaacgtcagttgacatcttagcctgctctgcatcaatttcacgcaggcgatctagcatctggagccatgaatcttgaatagcagagtaaacacccttaccatctgcgatattctgtgtatcaatagtgtactgatggtacatttcattgacttctttttctaagtctttactcttttccaattcgccatgagtcaattcatagctctcatcaatatgccgcaacttttctaccagtttctttgacgcggtttgctgatgtgagatcaaagtcagcattttactttgatttttttcaacaaatggtcttgccttgtattccttagctaaaacatcatacaggtcgtcaatttcgccagagatctttttattttccttggctaattcatccaccttagtctcagctagcaatttgcgcgcaccatcaatttcatcatgaatttccttgattctgcccaaaacatctacgctagtaaggtaatatttttctgaaatcatttttttataagcatcagacaattccttaagctgatcttggaacactacttcaagctgatgataaccctcttttagcggttttaagcgtttttgtaagttacccaaagacatccgaatcttggacaaaactcgcttagcttcaacatgatcaccttgtgaagaaagattttttgcttcttcaaagtcactctccattgatgctagttgatcttcaacctgatcaatcgcagcaccatattcaaaggaattggctaagatatcttttcttaattcacgataaactttaatcaaagcatcatattgaatttgattttccttatttgattcaagtagttccgtgaaaactgccttggtgttacgagcatcttcgagcgttggcttgataatctcctgtgcttgtttaatattctttcttgctttaaacaagcgataagttgcattttcattagcagcttcttcaactagcttatgcactcgcggtaattttttcttagctgcttcagtgtagctcttgcgccaagtatttaatgtagttaaactttcgccggccaaatccattttatccagtcgcgtaatatcatcttctagatgcatcttctcaatttcagtcactgctgcatcaatcgcttcaatttcttttagttgtttacgattgatcattagcattgctgcaactacgacaatgattaggatcaccacggcaataattataatagcttgaattgatgacatagtttatcctccaaaactatcataattataacaaaacctgaccctaataggtgcaaaaagctgttctattttcttgatttattattctgaactctatataatactattcgtgtaaaatatttgcagcaataagtgacaagaacgtcaacatcttgaaacgctttagtgaacgagtaacccgcgctgcattgggcgaaaatgtaaatccaagatgcacgaatgttgaacttatgcttaatattttactccaaaaattattgtttaaattttatggaggattttttatgtcaagatatacaggtccaagttggaaacgttcaagaagattgggtatttccctttcaggtactggtaaggaaatttctcgtcgtaactacgctccaggtcaacacggtcctaacaaccgcggtcgtttgtcagaatacggtcaacaattgcacgaaaagcaaaagttacgttggatgtacggcttaaacgaacgtcaatttagaactttgttcacccgcgctggtaagattcgtgaaggtcaacacggcgttaacttcatgattttacttgaacgtcgtttggacagtcttgtttaccgtcttggtttagctactactagagaacaagctagacaattggtaaaccacggtcacattactgttgatggcaagcgtgttgacattccttcatacgaagtcaaggttggccaaactattggcttgaaggaaaagtcaaagaacttacaacaagttaaggatgccttagaagcagttactgctcgtccatcatttgtttcatttgatgaaaacaaaatggaaggtactcttgtacgtttaccagaacgtgacgaaatggaaccagaaattgatgaagccttagttgttgaatggtacaacaagttactttaatttttacattttattttgtcgaaagtctttctcaatcgagaaaggcttttttctttgctacaataagtacataaaaagaaaggatgattagatgactgaagatttaaataaacgtgttgaacaagcagctcaaggtattactccacaaactaagcctgatgaacgccgcagatttttaggttcattacgtgagcgctgcttaatccgtatggacaatactgaagttaaaaatcctgaattaactgccctatttcttaaacatatcactgactttaagggctatactattttgatcaatggcaatatcactgatgatggcttcttgggagacattgaagccagttgcagcaaatatgatattcccttcactttagttaacaatgaaaccgcaaaaacaggaccacatgatacggcagtactagttgtagcgaaaaacgctatcaatcgaccacgaattgagctaaagcaagtttatccacctgagtttcctaaagaagaattagccgcacctaaaacaaaagaaagtttttggcataaactttttcacggagataagtaaatgaaaccattagcatatcgtatgcgaccaactaatttagacgaagttgttggtcaaaggcatctgattggtccaggcaaaattattcgccgaatggtggaagctagacttctgtcttcaatgatcctttacggccctcctggcatcggtaagacaagtattgctagtgctattgcaggctcaactaaatatgcctttagaaagctcaatgcagctactgacggcaaaaagcaattgcaacaagtagccgaagaaggcaaaatgagtgggacagttgtcttattgctggacgaaattcatcgtttggacaaaactaagcaggacttcttactgcctttgctagaatcgggacaaatcattttaattggggcaactactgagaacccttatatttcgatctcccctgctattcgttcacgttgccaaatttttgaattaaagcctctttctacagatgatgcttctcatgcaatcaatcgcgcattgaacgataaagaaaaaggtctaggcaaatataatgttgaattaacagatgatgcgcgtgctcttttgattgaaaaaggcaacggtgatttgcggtctactttgaatagtttagaattagctgttctttcaactaagcaagaattgcaagataaacaccaagatgatcaaaaaattatcatcactcaaaaagaaatggctgattcaattcaaatgaaggtgcaaaactttgatgcttctggtgatggacattacgatctagtctcagcatttcaaaaatcaattcgtggctctgatacagatgcagcgctgcactatcttgcccgattaattgaatctggtgacttagtctctatctgtcgaagactagcagtaattgcctacgaagatattggactagccgatccagacgcagctgaacacgctatagtagccatccaagctgcacaaatggttggcttgcctgaagcacgaattccactggctaatgcggttattgagttagctctttctgccaaaagcaatagtgccatttcagcaattgatgctgcactagctgatattcgaaccaaaaaagttgactcaattcccgccaacctaaaagatgctcattactctggtgccaaaaagcttggacatggcgtgaactacctttatcctcatgattatcaaaatgattgggtagcacaacaatacttgcctaataacctgcttcatgccagctactttgcacctaaaggcaattctaaaatcgaagctagatataaggcaacctatcaaaaattaaaacaaatgcagtctgataacttgcgcaataatcactaatctcgcgcattcaatatggttgacaagcacctgtaatatgcgtattataataagtgatctgagttgatcgacaagcttaaatgtataaagttgaccgatcaaactataagacgtgggagttggcaaataactaccgaatcggaatactgccttgttgcaggatccatattcgctgcgatgccagctaaaattttgaacattgcgggttcaacaagcgtcattatgctatgtttagtcaactcggatttctttagaatattaaaaaaggcggtctcaattgaccgtctttttctatagtggagactgttaaatggcaataaagattgtaatgattatttttatccttctcctactgttaacctcgtggtacatgtggcacagaaggaacggacattttttaatttatgacattggtggcgatccacgcttgagcaatattcttaagtggacttcagtcgcccttttagctgaaagtattttagggattattttgctattcatgggtaataaatatttaaatctaatcaccttattcttagcttcattaactattttggcttttggtttatcaattactcaaaataaagaataataattcactaatgacaagcaaaattttggtaaaatagaatatagaaagaggtgcttatatatgctttcacaatacaagaatattcaagttgcagttgatggttcaaaagaagctgacttggccttcagcaaggctgtagccatcgccaagcgtaaccatgcaacactagaaatcttacacgtaattgatactcgttctttccaaaatgtttcaagttttgattcagcaatggtagaacaagtttctaaagatgctgaaaagagaatgaaggattaccaagctcgtgccactaaggctggcgctgaagatgttcactactctattgaatttggttcacctaagacaatcattggacatgacttccctaagaagcacaatattgatttaatcgttgtgggtgctactggtttgaacgctgttgaacgtctgctcatcggtagtgttaccgaatacgtaaccagaacttctaaatgtgacgtcttggtatgtcgtactgaagaagttaaggatgctttgcaaggctaattatttagctttaataaccgataaaaaaatacctccaaaattcagatttgaatttttggaggatttttttaatgttatttctaaaaatcgccagccgtactgaacatgtaatcacgattatggaacttcatcgacaagattaatccaatcccaatcatgtttcccatcagagctgaaccaccctgagaaacaaatggcaatggaatacctgtcaatggcaataaatcaatattcatcccaatattttcaaatacgtggaacaagatcatcatgataacaccagttgcaatgtatgaataaaagacatttctggtatcgaacgagatttttaccatttgaataatcaggtataaataaatcaaaatcaatgctacacagccgacaaaaccaaagttttcaccaattaccgagaaaaccatgtctgatccacgaactggaacataaacgctagctttgccaaaaccattaccaaatagttgaccagaaccaatggctttcatactttgccataactgataagctcctgatgaagtatcaccagatggatcgagccaagacttaattcgttcaaattgatatgcttgaaagaaatgactcaacaatgattgcccagccgacgtagttactaatacaataaccccaatagctgctaaaatcaaaataccatataacggtacaataattttccaagaaatccctgatactaaaaccacgccaccaacgatggcaataaatactaacatagtaccaaagtcattctgtaactttagtaaaattgctaccggtgccagccaagcaataattttgcctaataacaaccaatcggtcttaatcgtgtgaccatatttatcattatgctctttgaccactcgagccaacatcaagataaaagctggcttcataatttctgaaggctgaaaagtaatcggccctagtttgaaccaacttttcgcacctgtatctgcagctacgcttctgttatataagaatagcaccgcaatcagcaaaaatattccgattccaaagaaaattggcgcaatcttaaacaactgttctgcatcaaactgcatcacaaccataataattgcaattgaaatcaagtaccataatgcctgcataactactgccctaacaggtgaaccaatatgactaggatcacctaatgcagcaacatagatacaatacaagctaattaaagccaagagtagcactggtataataatattccaggctaatcgatcgaatagacttgtttcattttcaacttttgccattaaataatcactacttatattttatttttcatgtaaggtaaagtatgaaagtaagtcattaatgctgctttcaagactgttagcaaacaaaatattgcttgtcttagaagtagtagcacgataacgcccctctaccttttcaattaaaccaatggactttctattaggaataacaacttcccacgttggcaaattctttcccttaagttcattaacttcaatatcaatattctctaattttttagacataaatcctcctacttgctatccggatgaaattttgaagcaataattggatcttcatatctctccggatgtggatttcgaaaaatagtaaaattatcaggaactggatccactccacccttgataaatgggttacaccttagtatacgacaaattcccataatcagccccaaaataggaccatgttttttcaatgcatcaatcatgtaattggagcatgttggataataccgacaacttggtggtagtaaaggtgaaatcactgtctgataaatacgtacaataaaaatcaaaatcttacgcaagtaatctcctcacttagtgtcgttgatgcttttcaatatttttaagcaaagtacctgttcctaaagcaactgcttctaatggatgatcagcaattaaaactggaacttgcaaataataagaaatcaacttatcaatattctttaatagggctccaccacctgttagcatgattccgcgatcaataatatctgctgaaagctctggtggagttgtttccaatacttctttagctgctgcaatgattgacatcaagcctggttctaaagccttttgaatctctggtgcagtaactgtagtctgcttaggcaaaccatcaactacgtcacgaccacgaacagtaatttgttcatcttggtctggttcaaaggcgctaccaatttcaatcttaatttgttcagcagttctagaaccgattaacaaattatgcttactcttaatgtaactgatgacagcctggttcatccgatcgccagcataacgtaatgattgagaagttacaatttcacccattgataaaactgcaacgtcagtggtacccccaccgatatcaatcaccatattaccttgcggtttaaaaatatccaagcctgcaccaacagccgcaactttaggttcaaagtctaaataaaccttgccgccaccagacttttcagctgcctgaataattgctttttgttcaattgaagtaactccagtaggagcacaaatcaaaatatttggcttggacataaagccttttacatttaatttttcaataaagtaagacagcattgcttcggtaatgtcaaaatcagcaattaccccattcttcaaggggcgaattactcgaatattacctggagttcttcctaccatctcatatgcctctgaaccaactgcaactaccttgtttgtatcggtatttacagctacaacagaaggttcatttaatacgatacctttaccagagacattgatcagtacgtttgctgtccccaaatcaattcctatatctcgtgccacgataaccctccataattattcaccgtccattttaccataaataatcatgactttcctttactgtccttgttttaacacaatctttaaaacaaattactcaattgcattgaagtatcgataaaagtaatgacaaaattgccaactaaaaagcctaagccaattgcaataaataaatataataattgcgtttcaaaaacatggcctttacgaataattttatctagttgaattgctttaactgcttgaaaagataagccaatcgcaatcaaatatataatgatactaataatgacatgaacgcctaattgaaacatatattttcctcaattttgacaaaaaaagacggatgcagcattttgtgcattcgtctcttccttcttctagtgacctttagtgttgtacacgctaattctgttcattgctcgtcttaaagcaacttcagcacgtgccatagtttgttcgtcatgtttttcccgtgcttccttcaaacgttgctcagcgcgttgcttcgctgcctcagcacgagaaacatcaatgtttcttgcgcgttcagcactatctgcaataatcgtagcaacattattcgaaaactcaatatagccacccgaaatcgcaatatgatcaactactgaatccatttcacggcttcgcttaatcttaacctcactaataactagtggagttaaaagtggtacgtggttatacatgattgaacgttcaccatcaacggcacgtacatcaacgatacttccacgatgtgaataaatcattccattaggagttacaacatctactttaaaaagcttctctggatctgccatttgacatcaccctacttttctagtaaagctttagcttctggatcacttggagttacacccatttcttgtgcttttttcaaaacatcttcaattgggccgacaccacgaaaggcatcttctggtaagtcatcaagatgaccatccaaaataagcttaaagcccttaatgctttccttaattggaacatatgaacctggtacaccagtaaattgttctgcaacaaagaagttttgtgacaagaagaattggaccttacgtgcacgtgcaacgatcaatttttcttcatcagacaattcatccatacctaaaacagaaataatatcctgtaattcatggtaacgttgtaaaacatgttgtactcgagtagctacttcatagtgttcttcaccaacaacttcagggtcaagggcacttgatgaagattcaagtgggtcaacagctggataaataccttgttctactaagctacgttccaagttagtagtagcatccaagtgtgcgaatgtggttgatggagctgggtcagtatagtcatcggcaggaacataaacggcttgaattgaagtaattgaacccttcttagtagaagtaattctttcctgcaattgtcccatttctgttgctaaagttggctgataaccaacggcacttggcatacgaccaagcaaagctgaaacttctgaaccagcctgagtaaaccggaagatattgtcgataaagagcaacacgtcttgaccctcaacatctctaaagtattcagcaagtgtcaaaccagttaacgcaacacgcattctggcaccaggcggctcgttcatctgaccaaataccatggccgttttacttaaaacgcctgaagctttcatttcgaagtaaaggtcgttaccttcacgagttctttcaccaacaccagtaaatacggaaataccaccatgttcttgagcaatgttgtgaattaattcctgaatgatagtagtcttaccaacaccggcaccaccgaacaaaccaactttaccaccacgtacatatggctcaagcaagtcgataaccttgataccagtttcaagaatttcacgactagtagtcaagtctgcgtacttaggtgcttccttgtggataccttcacgagggtgatcttttgaaaattctggaccaccgtcaattggttgacccaaaacgttaaacacgcgtcctaaagtatcttcaccaactggaacggaaattggaccgccagtatcttcgactttcataccacgacgaagaccatcggtagattccatggcgatcgttcttaagacaccatcaccaagctcaagtgtaacttcaaggacaatgctttcatcctctgacttaattacacgcaaggcattgttaatatcaggtaaattcttatcaattgggaatttaacatcgacaactgggccgattacttgaacgatttcaccttcactcaaaacatctacctccttttctttattactctaaggcatttgcaccactgataatttcagtaatttcagtagtaatttgtgcctgtctagcacgatttaattttgtagttaagtttgataccagatcattagcattatcagtcgcactctgcatggctgtcattgaactagcatgttcggcagtcttagcatccaaaatagcaccgtaaatagtagaacgtgcatattgtggtaacaacttcattaacacttgatttggatctggttcaatatcgtattctaattctttatgtgcttcagcttctttgacaccaatatctaaatcgacgattggtaacattttttcaacacgaaaagcagatgataatgagttaacgtggtgagtataacatacgtaaagctggtcatagacaccattcaaaaacatcttaattgcggttgaaacaattggtaatgcttcatcaaaagttggtacatctgaaacaccattcttttcataaacaacgttaatattgttctttttaaagaattgtgccgcaaccgaacctacagcaagaactttgatatcgtgtccttgagcacgttcgtcctcaaagatactcatcatattcttaatgacattgctgttataagaacctacaagaccacggtcacctgaaattaccaagaaacctgttgtcttgatattcttacgtggctgaatcatatctgctgtaatccccaaaccaaagacatcagtataatcaatttgagcaacattgttcttatcaattgagacgtctttttcacgtagattatcaactacttctgagctaattaaacgagaaatagttctacgaatatggtcgttataaacggtataacctttatcacgattttcagtttggttcaactttgaagcagagaccattctcatagcttctgtaatcttaccagtttgttttactgaagcaatttttttctttaactcaagtaaagatgcaggcatattctacctcctatttctcacttggtgtaaagctctcactgaattcttcaattgctgctgacaatttcttatcatctggcaattgaccagtttcacgaattgtcttgagcaaatcagcatgactgctgtcaaagttatcaaataattcgttttggaaacgagcaatatcttcaactggaacagcgtcaagatatccgtgagtcaaagcataaagaatcacaacttgcttttcaacaggaattggatcatgaagtggttgtttcaatacttcaacggttctttgacctctattcaacttagcttgagtagcttgatcaagatcactaccaaattgagcgaaactttcaagttcacggtaagctgcaaggtcagtacgcaaagtaccagcaaccttcttcattgccttgatctgggcgttaccaccaacacgagaaactgagttaccagcatcaatggctggacgagtaccagcaaagaacaaatcgctttgcaagaaaatctgtccatcagtaattgaaattacgttggttggaatatatgcagaaatatccccagcttcagtttgaataattggcaaagctgttaatgaaccgccgccaagtttgtcattcaacttagcactacgttcaagcaaacgtgagtgtaagtagaagacatcacctggataagcttcacgaccaggcggacgacggagaagcaaggaaagttcacggtaagcgacggcttgtttggataggtcgtcaaatacgattaatacatccctgccattgtacataaattcctcacccatagcagtaccagcatatggtgcaatataaagcattggtgctggctcacttgggcccgcttcaacaacaatggtataatccattgcgccaaaacgctttaaagtttctacttgagttctaacggttgattccttttgaccaacagcaacgtaaatacaaattacgtcttgccccttttggttaaggatagtgtcgatggccaaactagttttaccagtcttacggtcaccgataatcaattcacgctgaccacgaccgattggaactaaggcatcgatagccttaataccagtttgaagtggttgatcaactgattgtcgatccataacccccggagccttggcttcaattggacgactcttgtcagtcttaatttcacccaaaccgtccactggttgacccaatgggttaactactctaccgattaaggcgtcaccaacaggaacttccatgattcgtccagttctttgaacacggtcaccttcacgaatattgtcaaattgacccaaaataatgatacctacatcatttgattcaaggttttgtgcaataccgtatgagccgttatcaaacttcaataactcaccagacaaaacatcgttaagtccgtgagcacgggcgataccatcaccaacataagttacaacaccaacttcgctgatgtcaagcttatcgtcgtaatgttcaagttgttgcttgatcaaggaactaatttcttccgctttaatgctcaatggtttcacctcttttaatttttatcaattatctgcgcacggatcttcttcagtttattcttaactgatccatcaatcacgcgatcttctacttgaagaaccacgccgcctaaaatacttggatcaactttattctctagacgcaccacgtttaggttatatttcttagcaaaactttcacctaaacgtttgagttgatcatcatctagcttaacagccgtagttgcaacgccagatgcgaccttcttttcattatcataaagtaagacaaagcgatcaataatatcgatcaaatcagcaaaacgatcatatttaagtaacaaattcaaaaagttttgaacctcatctaaaaaatctttttcaattgcagtcaaaagatcctttttatctttattacttaaaataggatcgctcaagacactaatgatttgtggattggcttcagcagccttttttaattccaccatttcattataaacagtgtctaatgcatcattgtcttgcgcataaccaaatagtgcggcaccgtagcgtgctgcaatttcttctctacttaaagccattaatcatccaaccccttaataaattggtcgactaaatctttttggtctttagcagataaattcttagcaattactttttcagcgattgctacagaaatatcagcaacttgatcgcgtgcagaattcaaagcgtctgcttttgcctgatcggcatcttcattagcctttttgcgaattgctgcagcatcttcgtttgcatttgctacgatttctttacttgtgttttgcgcgttactcttagcgtcagagagaatttgtgttgcttcttgtcttgagttcttcaaggcagcttcacgctcattagcaagcgtttcagctttctttcgttcactagcagctgaatccaagtcatcaataactttttgccgccgcttttccatcatatctgatactggtccccaagcaaagtgcttaataagaagcatcaagatggcaaaacagatcaaataccagatagcattacctaagtaaatatgtgaggctgcaaataatgtttgaatagtcatttactgcccttctctctttaatactattcctttaaacagaaaattatctctttttattaaaggaacaaaatcaagaaggcaacaacgatagccaaaataggaacggcttcgatcaaaccaacaccaataaacattgttgctctcaagttacctgcactttcaggttgacgagccataccttcaagagtctttgaaataactttaccgttacccaatgatgcagccaaagctgctaaaccagctgcaatggatgcagcaagatatttaaaagcttctgacataaatttatacctccaaaaatttattctgtagtaaccttcttaccaatgtaaaccattgataaagttacaaaaacatatgcctggatagagccaatgaagacagagaaaccttgccaaatcatggctaatggagctgccaaaactaacgtaaatggtccaccagcatgtgctagatcattaccaattaaagttagcaaaacttcaccagcataaatattcccatatagacgtaatgataaggttaaaaagttggtaaactcttcaattaaattaattggaagcataaaaccaactggttgcgtatagctcttcaaatatccgccaacaccaaatcgttgtacgccgaatgtgaacgatagaagcaaggtcatcattgcaaacgacattgtcgctactggatcagcagttggtgatttaataaacatccaatcatcaactttgacttccatgaacatccctaattggttcataaaccaaataaacaggaataaaacaaatgcatatagtgataggtgattttgagcatccttgtcgctaacattatctttaacaatgccgttagtgaaatcaagtaaatactcgaacacattttgtctcttattgggtttcatttcaacttttcttgaaagccaaatgcagataaataaaactgctaaagccattagcgttgaaccgataataccagaaagttcaaaattcaagcccatgaatttaaaaacaaatgatttctccattacttcgtgacctcccttctcgtgctgaataaaactcgaacacgtaaatcatcttaacaccaaaaaaggtctttgtgtaaaatgaaagcgcattagagaaaatatttttctaaaaaggacgattacttagtaccaaatagtctgtcaccagcatcacccaaacctgggaaaatataaccattatccatcaatttgtcatcttcagcagctgcataaatgtcaacgtcaggatttgcttcttgaactgccttaataccttctggagcagctaccaaaacagcaagcttaatttccttaacaccacgcttcttcaatgcagcaatggcatcattagctgagccaccagttgcaagcattggatcaacgactaaacattcacgttcagcaatatcctttggagccttgaagaaatattcatgtggcttcaaagtcttttcgtcacggtacatcccgataacggcaatcttagctgaaggaaccatttcaaggacaccattaagcatccccataccggcacgtaaaattggcacaattgtcaacttcttaccagcaatttccttttggacagtcttacccattggtgtttcaatttcaacatcttcaagtggcaaatctctagtgatttcataggtcattaacccaccaatttcaccaacaatgcgacggaattcatttgaccccgtatccttgcgacgaataatagtcaacttgtgttgaatcaatgggtgatccaaaactacgaactttcccatatatgcctcctataaaaaataatatgatcattaaatattttaatcaaaaacgcaaagggtttaaagccctttgcgttttattttttatttattgaaatgatgtccacctgcagctttattcaatcgattcatgtaagctaaactttcttcaccttcatgaaatccttgtacataaatagtttcgatatcatcttgatcatcgaaatagcgcaagccaccaaataagttatggtcggcatcaactaaattgttgcccagatcaaatttatttgcttgaggtaaattaattttagctaagactggcgctaaagctgctacaccaattttttcattaaaatcaatttttgcaaaatcagcaggatcatcaaccacgactaccggctcacttggagcataatgacggtatttcattcctggtgccttaggtatatctttgtctgacactttgcccgtgttaattaaaactttttcacctaaaacttcgcttaactcttctggagtaatttcaccaggacgaagaacgattggtgtttctaccgataagtcgataattgtcgattctaatcccacacgagtagggccatcatcaataattccggcaatcttcccttttaaatcatggtaaacgtgctctgcagtagtaggactaggcttagttgaggtattagccgatggtcctacaattggataacccaatttagcaattaaatcatgagtcaattgatcatcaggacaacgaaatgctacagtatcaagtcccccagtaactgcatctggcagagttcctggtttaacaaacaatagcaatgtcaaaggacctggccagaaatgtttaattaatttcttagctctttctggaacttctttagcatacttagccatcatttcttcgtcagaaacagtaacgatcaatgggttatcacttggacgtcccttagcagcataaacgcccttcacagacttttctttggttgcaattgcacctagaccatagactgtctcagttggaaaagcaaccaattcacccttagctaacaacttaactgcatcattgatttgatcttttttaaaaatcttcgtttccatcattcttatttttgccaccttccatgaaccatgcgtggcttgccggccatatcttttctaaattcgatttcaaaatcaggcaattctttagcaaacaattccttcagttgttcttcttcgctaaaaccaaattctaagaaaaattctccatggctattcaaatgctcacgcacttgcttagcaaattttttatagaagtctagaccatctttgccagcaaaaagagcttctttaggttcattttgcaagacattttcatccattacattcttttcgcttgtcttaatatacggcggattagagatgatcttatcaaattcttctaagcccaacagcacgttggctttacgagtagttacatcaagatcataagttaaaaagttttcctcacttgttcttaaggcagtatccgttacatcactagcatataaagttaaatctgtaatgccttttttctgtgcttctttagctaaagccacggtaatacagccagaaccggtacccaagtcaaggacttgatcacctgatttaagtgtctgcaatgcccattcaaccaattcttcagtttcaaaacgaggaatcaagacaccgcgttgcaccataattttatagcccaaaaaccaagcataacccaaaatatactgtggagatatgcccttagccaatttttcgatatctttattggcctgcttaatctggtcagcagttaagtccatttcttgcttcagttcaaattcacttggtgtcaagcctaagcgctctgctagaacataatcaacatcctcaggacgcgcattttcagcactctcacccgctttaatacgcatctgctttaaagtcattttaggcattttgatcagccaactcctctaattgcttagtttggttgtaaagaattaatgcatcaataatttcatcaagttcaccgttcatcacacgatcaagcttgttaatggttaagccgatgcggtgatctgttacacgattttgtggatagttatatgttctaattctttcggaacgatcaccagtaccaactgcattctttctcttagcatcgtactgagcttgattttgactttcataatagtcataaacacgtgatttcaaaatttgcattgccttttcacggttctgttgttgactacgttgatcctgcattgcaactacaatcccggttggcaagtgagtcattctaacggcactagaggtcttgttaatgtgctgaccaccggcaccacttgaacggtaaacatcaacacgaatatccttaggatcaatatcaatgtctacttgctcatattcaggcataacagcaacagtggcagttgaagtatgaacacgtccttgagattcagttactggaatccgttgaacacggtgtgcaccattttcatactttaatttcgaataaaccttgtcaccagtaatcatgattgccacacgtttatagccgccaacctcagtaggttctgaatcaatcattgaaaccttccagttttgacgttcagcatatttttcatacattctaagcaaatcgccagcaaacaaagaagcttcgtcaccaccggcagcaccacggatttccatgataatatctttatcatcgttaggatccttaggcaacatcaaaatcttgatttgatcttcaagctcgggaatttctttctcaatttcagaattttcttccttagccatttcaattaaatcaggatcagtttcactggagataatttctttattatcttcaatctcttttttgtcctctttgtacttcttatatttttgtactacttcacgcaaatcggcttcttccttagaaatctccatgtagcgcttagtatcattaataacttcaggatcggccatcatttcctgaagttcttcatagtgagctactagaccctctaattgagccataactttatccataaactaaaaatcctctctatctttcaacacctgggtgaaagtaatgatagcgacaaacaggataataactttcatcgccaccaatttgtacttgttcaccctcataaacaggcttgccattgttaattcttaaattcattgttgccttgtgtccacaataatgacaaatggtcttcatctcttctattttatcagcaaaaatcaataaattttcactaccttcaaatagatgattttgaaaatcgttttttaagccaaaggtcattactggaatattgaacacatccacaattttagcgcattctaagacatgatgtctcttcaaaaattgtgcctcatcaattaacacacaagctagtttaccatcaccatcagcaacatctgctttgttcatctttttaatataatcaaatagattcatatcagcagtaattggaattgcttctcggtgaagtccaattctagaagcaatcgttcctacaccgctacgattatccaagccactggtcattagggcaatcttgcgcccctgtgcttcataattgtgagctactttcaagatctcaattgttttgccactgctcattgcaccataacgaaaaaataattgcgccatgctggccctcccttttaacaaaaagtcttcgccttaatagtatagaggaaaaaataaatttgtgtaggtattaaacctcgttttcatcctcgctctatgctaaacttagacatagttttaaagtgagggatgtacatgagttttaaatcaggaattgctaaagttgccggtaaatcaagctattggtttttgcataatgcccttaagggcggcaccagttttccaggcaaattagcaatgaaaattgatccagaagttttaaattctttagccaaaggctatgaaactgttattgtcacgggaactaatggtaagacaatgactactgctttgattgttgaagctttaaagaaaaagtatggtgatgtgttaactaatccatctggttccaacatgcaacaaggaatcgtgaccgcttttttggctcacaagcacaagagagttaaaagaaaaatcgctgttctagaagttgatgaagcaaatgttaaaatggtgaccaaattacttcatcctagcgtctttgtattaaccaacattttccgtgatcagatggaccgttatggtgaaatctataccacttatgacaagatcgttaatggtattaaattagcacctgacgctacaattatcgctaacggagatgcaagcattttttcatcagttgaattgcctaataagaaaattttttatggctttaaacttcctgatgacaaacctgaaaacgacttcaaggctccagtcaataccgatggtgttctttgtccaaaatgcgaccacattttacattatcatgaacgtatttatgccaacttaggtgacttcttctgtcctaactgtggctaccaccgtcctgatttaacttttacagttaacaagattattgatcaaacacctaatagctcaacgttccaaatgggcaacaagcaatattccattaatattggtggtacttataacatttataatgccttagccgcctattctgttgcacgccactttggattaactgaagctgaagttgctcaagcttttgcagaaaataaacggatctttggtcgtcaagaattaattcactatggcgataaggatatcgatttaattctagttaaaaacccagttggtttggatgaagtcttgcacatgcttaatacagaaaaagatgattattcactagttgccttgcttaatgccaaccacgctgatggaattgatacttcttggatttgggatgctgattttgaaggattagacaaagaaaagattaaaaagatcctcgtcggtggtcaacgctggcatgatatgggctttagacttgaaattgctggctttgatccaggacaaatgagtactaatccagatgatgatagcctaattgaagaaattaaaaaactgccaactaagaaggtctatattctttcaacttatactgcaatgcttgcacttagaaagaagatggccgaaaagaaaatcattaaggctggtatgtaaatagaaaggattcccgcgggaatccttttttgtgtacaaaaaaggctgtagctctaatgctacagcctttctaattattgggatattggggctcgaacccaaacatccaggaaccagaatcctgtgccttaccaatttggctatatcccagtaaatcacccgtacgagaattgaactcataactccaccttgagagggtagcgtcttaaccatttgaccaacgggcgaatcaacatttataattatgcttttttcttctatgcttgtcaagtaattttaactataataatgctaatggatggtgaaacatgatcgactttaataaaacacagcatttaattgaatcaatggtttttgaacgcgttgttccaggcgtcaattacacttttatcaaaaataagcaaatttttacatcaactactggttttgctagtatctacccagaagttactcagctgagcccttttgcagaatacgacctagctagtttgactaaggttttagcaacagaaaatgtcttgcttaagctttatgaccaaggcaaacttaactttaccgagcccttgcagcaattcgttcctgaatttaaagacccgcgtgtacgcctttatcacttgctaacccatactagtggcattcgtggctggatcccccaccgcgacaaactagatcatgatgccttactacaagcaattatcaatctgccagtaactgacgaatttgaacacaagatgcggtatgccgatacaaactttatcttacttggattagttattaaaaagatttttggtaaacctgtccaagaagtagtcacagagcaagtcctcaatcaaatgccgcttgaaaatactactttttcaccacaaaaagatgattgcgtgcctactgccctagttgatggccatgtcttgcaaggtattccacatgatcctaaagctagacaacttggaatagattgcggttctgctggcttattttccaatcttcaagacttagttaccttcgcccaaggttatttaggactaaaggatattttaccttatagtcaaaagactgtcagccagctatttgataataaaaatccccaaggcataaaaccacgctcttggggatgggaccttcggtttgatccaaagcaaaattatccgatcattttgcacacgggttttactggtactttaattattcttgatcgcatcaaacgctctggtctaattttattgaccaatcgagttcatccgactggacacaacactgttttcttagctatgcgcgaaaaaattatccgtagttttatcaacgaaaacgccaaaatataatttatagaaaaaagacggctgtgtgtcagtcgtctttttatctctcactaaatttcatcatccgtctagtattataacttattttaacgctaatgtactagtcaaatattatttttctgctttaaacattttccagtagctaattaaaatgattaatgccattaataaagtaaaataaaaggccgcctgactaccttgagctgtcgctagtgcgtaggacgttgcaccttttttctgccagatcgacataattgctgctaagatagttgttcctacagaaccggctaattgctggctagtctgacaaactgcggttgcatcggcgcgcaatgctcctttttccacctttaaagcttcagctagcgtgttagaaaatgacattctgtgtcctaacatcatgatgccataaataataatgatcatcatcacagtcaaatttaagccccaaatagcaaataacaagcagctgatcgccattaagaagccacctaaataaagtggcaatttagctccttttttatcatataggctaccaaaatatggattgagtagccctgcaataatactacctgatagtaaaatcaaaccaccaactaaagatgtttgctttccgacaatttggatgtagttaggcaatacaaaactgataccaatattattaaattgcaataaaaagtaagctaacgcaccataaacaaacgctttttgcttaaatacggctagatctaacaatttcttggatgattttttagataatctaacaaataaccaaattaaaattgcagtcacaattaataaaatccacattaaaggattagcaaatccattactaatttgatttacgcctaatgtcaaagtaataaatgctatagctaaaacgataaatgatagccaatcaaaactatttttagtttgttcatgatacttaccgactacaaatagcccggcaacaaaaacaatgatcgcaaaaattgtaacaaaaccaaaaatccagcgccagttaagataaaaagtagtgataccgccaaatgctggtcccaaagtcggtgccatagctactactaagccggcgattcccatgtaaacgccccatttttcgcgaggcataacttcggttactaagttaaacatcaacggtgtacttaatcctgcacctagagctgaaatcagccgacctaacaataaaataggaaaattaggtgctacagcactaattacgcttccaatcataaaaccaacgcaagcaacaataaacaattgccgcgcagtaaaacgttcattcaaatatgaagaacaaatcataataatcgcaatcgccaataaatatcctgttgtcgtccattgaattatatccaaaccgacaccaaattgcttcatcatcgtaggaaaagtgacgtttaaactagtttccgtcaaaattccgacaaatgacataaacgcagctgataatactgctaaaacatttttagtattctctttcacacaaaaatcctttccacaaaaaaagaaagagcaaaaaacctttgtttcctattctttctttaattagcacagctaattatattaatacgcatactatcaaatatgctgagtatatctaatattaaagacgcttagctaaatcgtcgtgtaagttttcgtaacctggcttgttaagtaaaccaaacatgttacgcttgtaagcttcaacacctggttggttgaatgggttaataccgttcaagtaacctgaaatagcaattgctaattcgaagaagtaaatcatgtaacctaaagtatgtgcactttggtctggaatgttaacagtcataactggaacaccaccatcggtgtgagccaaaacaacaccttcataagcacgatcgtttacgtagttcaagctcttaccttccaagaagttaagttggtcaaggttcttttcatcgcctgggatcttaacatcatgacgtggattttcaacacggataacagtttcaaataaattacgtaaaccttcttggatgtattgaccaagtgagtgaaggtcagtagtgaagttagcgcttgatgggtaaatacctttttgatccttaccttctgattcacccattaattgcttgcaccattcaccgaacattcttaaacttggttcatagttttcaacaatttcagtagtgtaacccttacggtaaaggatgttacgaagtgctgcgtattggtatggagttgcctttgacaaatcagtatcagtgtagtcagcacgtgcgtctgcagcacccttcatcaattcgtcaatgtcagcacctgaagcagcgattggaagtaaaccaacagctgaaagaacactgtaacgaccaccaacatcatcaggaactacaaattcttcgtaaccttctgcatcagcttcagtctttaaagcacccttttgacggtcagtagttgcgtaaattctcttagcagcttcttccttaccatacttcttgattaacttgtccttgaagattctgaaggctactgatggttcagtagtagtacctgacttagaaattacgttaacactgaagtccttgtcgcctaaccattcaatcaagtcataaaggtatgagcctgaaagtgagttaccacagaagacaacagttggcataccgttcttttccttgccatagaaattgctgttcaagaattcaattgcagcttgggcaccaaggtaagaaccaccgataccaatacaaatcaaaacttctgaatctgattgaatcttcttggctgccttcttaatgcgggcaaattcatccttgtcatagtcaactggcaaattaagccaaccacggaaatcgttacctgcaccagttccatcgcgaagttcagtgttagcagcgttaaccatagcttgcatttcgcttaattcattttcatgaacaaattgtgttagtttactactatcaaatttaattaaactcataaatctgcttcctaactaaataaaatatttttcacaaacctattttaacaatcttgatttataaataccagtacattataagcgcattcaggcttttttgacaattttaaaaatcacataaccccaaattgctccacaagtattgaagaaaacatcatcaatatcgctaacccccgtcaccagcaaaaactgcagagtctcaattcccactgaaaacagcatccccatcagtaccgtccttaaaaacgttgctctttttgaaaaaacaatggggaaaaaaatgccaaacggcacaaagcacaagacattgccaaaagaattataaaagaaatccaaatgactgggagcatagactaatttccaagtttccttcatgaataccaagttaatatcactcaatggcctagagaaattaaaatcaagctgccacggaaagtaggtatttctaaaagttgtcagcatcaaaactaagattatgtaaaaagaaaagacccaaacgctagcttcagacctaattgatcttctgcggcgcaccaaaagaagccaaattaagcgcaatacagcaaaaattaaaaaataaaatattgttttatccagcgctaataaggttaatttaactaatgcaaagtggttaatattagttgcatactgtttagctaaaaaactataaagtgggcccaaaaatagcatactttgcctctttccaaaatattcattatagattatacctattttcacggctggaaaatcttaaaaaaaagataactcttagcaaattattgttttaaaagaggtgaaccattaaaattaaaagatgttaaaggagcattatatggaaaaaaagaaaattatcagttttattcaaacacgaacgggctttttaacccttttagttgtttgtttctggctgaaatatatttttgcagcttattttgatttcaatttaggcttgagcgacccgtatcaacatttcattatgtggctcagccccgtagggtccgccatcattttaatcagcttcggtttttatattcctaaaccgctgatctcttacatcacaatgttaattttagactttgccaatacggcattgctttttgcaaatattatctactatcgtcaattttcggactttttaacaattaaaacgatgtctaacgttggtaaagtttcgcagggtctaggtaaaagtaccgttgcccttctgcatccaacagatattattatctggattgatttgatcgttattgttactttactgatcattcataaaatcaaaattgatcaaagatcttacggcttatccaccccatttgcgattacctcagtaggcgcatttgtcctaactcttaacatttttttggcagaaacctctcgtccgcgcttattgcgcaacacttttgatcgctcctatgtcgttaaataccttggtattgacacctttactgcttatgattgcttcaagagtgcgcaaaatgttcaagtcactaaaaatgccaacgctgcggacttgaaccagattttaacttttaccaaaaaacaaaatgctgctccatcttcctcatattttggtattgagaaaaaacgcaatgtgattatcatccacttagaaagtttccagcaatttttaattaatcttaaggttaatggcaaagaagtgacgccgttcctaaattcactttatcaaaataaacatacgctcagttttaacaacttctaccaccaagttggtctaggtagaaccagtgacgcggaaaacatgctagaaactagtacttacggtattcccgacggatctttattcacttctttaggttcggaaaacacctttcaagctgcaccgcaaattttgcgtcaagatggctatacttccgctgtctttcacggcaacgtcggtagtttttggaatcgaaatgatgtttataaaaatatgggctataattatttctttgataaaaattactatagctcccaaagtaaagatgcaagcggctatgggttaaaagataagctgctttttgccgaaagcgttaaatatttagagcagatgcagcagcctttctatgctaagttcattacggtaaccaaccacattccgtttaacttagataaagaagacaaggaccctaactttaagactacaaacactgccgaccaaactatcaacaattactttgaaactgcccactacctagatgaggcattgcgtgaatttttccactacttaaagtcttctggtctttacaaaaactcaatggtagtcatttatggtgatcactatgggttaagtaattctgaaaatgaaaccttagcaccaattattggtgaaagctctgacacgtggaatacttacaataatgttcaaatgcagcgtgttccattcatgattcatgccaataatttgaaaggaaaaattaatcatgaaattgctggtgaaattgatgtcttgccaacactgatgcatttgctcggtattaacaataaaaactatgtccaattcggtagcgacatgctttcgcctaaaagacaaaattggatcgtctttcgtaatgggaccattgtcagctccagatatatcatagttggtgctaaaggaatcaaaggtaccgtttatgaccgagttagcggtaaacaaatcattaattttactcctcaagagaaaaaagaaatctctgagctagcacaaaaggccaaggcatcattagactattctgacttattaaacaaccacaatttgttacgcttctacaccccaactggctttgtccctgctgatccaacccaatttgattattccgtcaattatcaaaaaatgatcgctatcagaaatgaattagctggcaattccacctcgctttatagcagacatcgcggtacaactactaatctttaccgtactgatgccgctgaactaaaagatagaaaacaagaaattacccaagttcctgacagcgttaaaaatattaaagagaatacgaaaaacaaaaatagttcagaaaataccaataactaaaaagaacgcacagacctttcaaaaaaactgtgcgttcttttttagtttttagctacaaactgttcatagcccttgtcataaaaggtcacggtgaatgtggaacctttacctggtgcggaaaatacttctactttgccaccatgttgcttaatcaaagaagaaacaatcgcaagtcccaagcctgattcgccagttcccattcgagcacgcgatggatcagccttgaaaaagcgttcaaaaatatacttagtctgattcttgctcatgccaataccattatccttaaccgataattgtgttccatgctctatccgtttacccgaaataataattttgccatcatgagtgaattgaatcgcattttgaactaagttaaccattacctgggtaaaacggtcacgatctgcataaataggcaactgatcaggtgcctctacaaccagctcatcgttggctttagttgcattttgttttaattgcgacttcaaatcatgcagaataattgtggcattaaagttagtcttaaccagcataatttgattatttcgaatcttttcatagtccaaattttcattgactaaccgaattaatcgtttagtttcgcgctgcattaacgcgattgacttcggtttagaatcctctgggatagcatcgtattgcaagccctctagaatgccattaattgttgtcaatggcgtccgcatttcatgagcagcatcagccatgaattggtctcgtcgctcttcttgagccttaacctcttcgttcgactgcttcaaagcctgcaccattttattgaaattctcagccaattgatcaatttcatcgctatctttatgctcaatttgcacattaaagttacctgatgcaactttttgcgtagcacgtgataatcgcttaattcgtttagttgaataataagaaataataaagctcagcaacaatccaaccgctacagtaattaacaatgcacgcaacaaattgcgtttagccattaaaatcggtcgctcaacatgctttactctcgatcctatccaaacaatgccaacaagatttttgccattcatccatggaaccaaaacccccgtgtaggcatccttagttgaactaatcggtgaattttcattatgattattttgaattctaatctcttgcccattttttaaagtagtaaaaacttcttgtgaaagctgaattctagcctttgttttgggataaatctgctcatttttatcattaaaaatacgtaaatgagcatcatcaccacgaagaacatattctaattgattcaagaagttattgctaagcaatgcagtcccattttggctatcagcttccgccaagtttcccaaagaattagcatagctttccatccgctggtagttttgcgtataagcttgattacgcgcataaccaatctctgagtaaccaataatcgagatagttgtcacaataatgagtaagaaactcaacatattttggtaaattaatttcattatttgacctgcgaatcatcaaacttgtaaccgacgccccaaacagtttggatcaccttggcaccaaccttctctaatttctgtcgaagctttttaatatgagcatcaacagttctttcttcaccataatactcatagccccaaactagttctagtaattggtcacgagaaaagacttgtttaggcttttgtgccattgtatacagcaaatcaaattcttttggtgtcaaacccattaccggctgattatcaaataaaacttctcgtctattttttgaaatcttcaaatgatcggtcgtaatctcatagtcttgattatcttcttgagtatgagctggttcttcttccatcatcacgcggcgatgcaaagccttaatgcgggcaatcaaagcaattgggctaaatggcttagtgacatactcatcagctccgatacctagccccaacacttgatctgattcactgccacgagcagtaagcataataattggcactgtcggcgaaattgcccgtacctctttagctacttgaatcccatctttttttggcaaattcaaatctaacgtaatcagatcatacttatccgcgttctttttaaacatatcgacggcttcgacaccatcaacagcaatgtcttgttgccaaccttcttttttgaaaaacattcccatcatttcagctacggaagtgtcatcttcgaccattaatattctcaaactcattatcaatccctaaatccttttgttctcttatgcttcacttgatcaggatcgacatagtcatgtggcaattcatgtcgtttagacaaaaatgttttcaaacttttttcggtataaacaattggcaataagataaataaataaaatgttaacagccaaatgagaaaatagcgatcccaattcaaatagtgaatgattactcctaacagtgcttgaataaacccaaacaggatacaataccagcttgcccgtttctgagcaaacttaaaactatcctggttaacttgcgcaagataagataaatagccataaattcggttgggccttttggctggcgtaatcagccaaatcaaccctaccgccaccataactaagccacaagcgacatagatcacgatttctcactcctaattctgataaatttaaacggttattcctcacctggtgcagacataactattctcattttaccagtgaaagtgaaattcttcatctcatttggaataattaaattagttcccatcttcaaatcatatgacttgccatcagcttctaattttccttcgcctttgataacggaaactaacaggtatggatgatcctttaagccggtcttccaagtaccatcaaggtcaatttgccacaaataaaagtgtggtgaaagtggtggttcaaccaatgtcttaatttctgcatcttgatcttggctagtcttaacatctaacttaggatcaacatggggaacagtggtcacatcaattgacttttgagtatgaagctcacgctttttaccatccttgcccacacgatcgtagtcatacaagcggtaagttacatcacttgactgttgagtttcaattactaagcatcccttagttaaagcatgaattgtacctgctggcacatagaagaaatcgcctgctttaaccggaacttttctgagcagcttatcccattcgcctttgtggatcatatcagctaattcttcacggctttttgcatgatgaccataaataatataagcacctggatcagcttgcattacataccaagactcagtcttaccagaatcattttctactttgcgagcataatcatcatccgggtgtacttgaactgataaattatcattagcatctaggaattttaccaataatggaaattccttggccttaggattgccaaacaattccggatgcttcaagtaaacatcccgcaatgacattcccttaagtggcccatctgttacagttgacgcgtcatccttgtaacctgaaataatccaagcttctccaacttttccttctggaatatcatagtgaaaaatatcatctaatttacgtccaccccaaatttttggcctaaagtatggggttaaaaataatggttccatttaaatcacctcaattaaagtataaactttaaggcagaataaatgaaacccttttcttagatatatgtatactatttgttttacatgtaaagctacttgttatacttacgaatacctgtagctaatctttgcatcccatccttgaccatcgtcaaaggacaagctagattaattcgaataaaatcatggccatttccacgataaacactaccagctgaaataatcagcccagtttcttggcgaatgaactctgctaattcctgtgaatcagtactgatcttttgcacatcgatccacatcaaatatgtcgcattgcccgaaatgatttgtacttcaggaatgtttttttcaataaaattctgcacatacgcaaaattttgctttaactgttttttcaaagcattaagccaatcatggccttgctcataagccgcaatcgttgctggaatcgccaataaattaggctcggctacttcatcactatttaaaccgcggttaaccatattgcgcaaattttcattaggaacaattgccgtagcagaatgaagagcagcaacattaaaagttttgcttggggacactagtgaaatcacactattttgtgcttcacctgttacagaaaaggctggcgtgtaatctggaccttgtctaaccaaatcaccatggatctcatccgatagtaatgttacatggtattggtgacaaagatccgcaattttttgtacttcttcactagtccaaacttttcctactggattatgtgggttacaaaaaatcatcaaagtcgttagcggctcagctaatttttgttccaagtctgcccagttgatcgaataacttttaccatcgaaagctaaatcactcgacaaaacatggcgcccattattcaaaatggaattataaaaaatattataaactggctcttgtactaaaacattatcaccaatatgtgaaatacggcgtacaattgatgaaatagcagggactactccagtagtaaaaatcatccaatttgtttgtggccgatgattatgttctgtttcataccaatcagcgacagcattaaaataatctgcttgtgggaactcataaccaaatgcacctaatgtcaatttttgttgcattgcctcgataatttcaggtgccgtcttaaagtccatatcggcaatccacattggtaattcatcagacttcacatcccactttactgaatcagtctttgacctatctggtgcattttcaaaatcatattgcatatatctcactaatcctttggtgtttggttcgtatcagaatgaacaatttttgtacctattttcggacaatcaagctcggttttagatggatctaccttatctggatcgataatcaaagtaccaatctcaggtaccgtaattttaccagaaattgggtttttaatactatcaatctttgtattaagctccacatctaaattagaaacatattcaaaagctaaatctgtatgaatcaaggaaccattcttaatctcaagctgatcaatgtagttcaagccctgatcactttcaattttacaattaattaacgtaatgttgttagtattccaagctaaatattcaccatcaataattgaatcgtaaatagtgacattattgcaattccaaaaagcatctttagagataaaagttgaattatgaacttcaatgttttctgcaccatcaaaaacataatttcccacaacggaaacgtgatcaagataaatattctggctatctttaccaaaataatcaccattaatttgagaattggtaatcttaatatcattacaagtccacattgtttcttctgcgttagcaaaatgaacattatctaaaataatatgacttgtccttctgaataatttaggtgcctgtaaagcactatttttaattgaaatattcttggtataccaaattccagaccgtgacatagtttcaaacgtggtattttcaactttcacattttcatcataccaaagtggatatttccatttaaaaattgaattctttaatctgatatttttagcttcttttaagggagattcaccactgccaaatgtaataccatcaaggattgcatcagttaatccataaagaattctttcacctgcaaaatatttatttttgtattccataattgtttccacctttttgttaatttaataatcattaattttaggacagtattcattatatgatttctttcatgcaatgtttaatacttatttttagtgataatgcataacaaaaatgcatagcagataaacgatttagcaaaacaaaaaaccgctctagaacaacatctagaacggttatctatggagatgaggggagctatctctacttttagttatttccaattacttctaagcaccaaagttaagccattttgatgttggttgattttagttaattttgaagttggatacctttttggatacctgataattttgacaataaaattaaaagcctatatactaaattttgtcaggttagtatataggcttcgtttttgtgtcactagattttgtcgctagtgacttttttattcttcaaattcataagaatctgaaatagcatttataacatcttttataaaagatgcaggtgcatgatccactttgtaccaatgccgtgcagctaagtctaaagttgtttcctgttgtgcttctgcaactccatggacttttaaaccttcaggaactggaatatgtaacggaaaatcattttctgttttactaatcggtactactttcacaagtgatctagttaacctagtaaagtcatgattagatacaattaaagcaggtctagttccttgttgctcatgtcctaaacttggatcaaaaccaataatgataatgtcaccttgatgaacatcaatcattttttcaccccccctttttatattttaggtgactttcttaccatttaatttctttacctacaggcttgccccaatcaacttctttggattcaccaggatgttcattatcccatttatcccaatatgcctcataatcaaagccctcaaatcgttgtgctagcttgctctctttttttcttttcaaaattagttctttattcttaacttttacctcaaaagtagctttttcagtagtaattccaagatctctgagtagtgacttagaaagtctaataccttgggaattaccccatttttgcaatgtaatctccataagaaaacctccaaaaattacttatcctttactaagtatatactagtggatatacttagtaaaggataaagtagtaaaaatcagttttattgttagaatctttatctcagcataactacaataaaaagccatcctatgtgtcttgatttctaggatggctttttacaacaatacatatcatttaaatatacgctacatatatttaaatgatcaatatcatctacttaatcttcttatttcatttccaaccttccttctaaaatcacatcattcaaaaagctagaagatgagctgtatccatgttcttttgcgatctctgttaactttgttcttgcacttggtctcaagctaaaggtgtaaggtcttctcttttctctcttaatgtaattacttgattctttagaaggtgcttccttactagaggcttcactaactctagaagtttctttcaatacttctgcaaactttcttccttgatttgggttaaaactcatttaaaaatcctcctaattattcctacactgtacctaacttcttggtacctaaaacaacatatcctggtacttgcttaaaagtggtcttgtatgtgatcaagcaatgaacctctcgtcctgtgtaatttgaggttgttggattatactcttccagcaatagcaaatctcctacctgataattacgatcattttttctaatttcaaaatttttagagttatttacttgtgcctcaaaataacttggaagaatttttactcgatgttctttgatctcatatacgccacttgatgtatatactttcattagcattacctcatattttatttatacattacgtatacttagtttatatttaatgtatatttgctttatacattattgaaactgtcaaatcttttgtgtaaatagttctttctcgtaaattgattttttaattatttatttaatcaaagtaggattctaaggtgtcctgaacctgaccaaagcctttatgaattcgattgaaataacggtcattgtagctcattgcctgaataccaataaaagcatcaagcgactgttcagttggaaactctgccttaggcttagctttgcgcttgatcacattgttaaatgattcaatcatgttagtcgaataaattgaagctctgatctgcttgggatagttataaaagaccagcagatctggttctatgtctttcaagcttctgataacatggctgtaaaccttgccccatttggtatagaagtcatgcaggacagctgtggcttcttctttgtttgtctgttgatgcacctgtttgaattcgttcatgatcttttcacgatcgtcgacgcgtactttagcgcagatattgcgcatgacatgaaccaaacagcgttgaaaatgagctttaggataagtcctggccaaggctgttttcatgccaacaacaccatcagaaagaaagagttcaacttgcttcaagcctctggacttcatgttttgaagcatctctgtccagacttcaatgttctcactaggagcaatgcagtagtcaatgacttccttatgtccattaggtttaatgccaatggcaatatatactgcttcacgctcaaacgtttctcggcgcaaaggaaggtatgtcgcatccaaatagacacagaaaaacttgtcgcttagcttgcgcttgtgataagcctcaaccttggggagcatctgcttggaaatatttgatacctgagctggactgtaatggctgccatacatcttttcaattagatcggctatttccctggtggtcacgcccttggagtaaagcttgataatcatgctttccaagatatccgagtgctgcttgtagtcaggcagcgtgtgctgatgaaattgaccgttgcgatcccgaggcacttgcacttcaattgggccaaattgcgtatcaactttgcggaaataagcaccatttctagagttgccagtattccagccatttctggcatagggatcatagcccagaaaggcagtcaattcagcttctagcaagttattaacagcctgttgtagttctttgcgcaataaatcatttattttgtctggattgaatagagcttgagcaaaatctttggtaaaatcattcatgaaggagttcttctttctgtatgtgttttttttgttcaaaccaatcatacgagaaaggaactcctttttctaatgtttaaagaaataaatttaaggaatcattcatccttacacaaactattttacagtctcacattatttgtaatggagccaaagataccatttaactcattgaaaaatgatccatacctagattgcatttttttatctttcatcattgtactgattgccactttatctaaagtggagcggttaaacagctctcgattgggaatcttaacaatgacacttggatctttttgtaaaacttctaccaattcacgagaagatctagtgttgtttttaatcatgtttccaacaaatagcaattttgcatctactaacgactgtctcgtacgataatcgattgtttctcgtttaagctccttaaagcgctgctctaagttgaatttggcactataaccgtgttcgctcggagtaatagggctaagaatatcatcactaataatcactgcgttctttgtcgcaattgaaaaatcagggtggcaatcaataataatgtaatcgtattgatctagttttctagtgtcataattatctgctagccacatgtatagcagcatatttttatcgactttagtttcaatgtctgcttcaatatcgtctaaatgcatatctcctgcaattagatcaatattttcattaatctgatggattttaacttgatcattctttaagaaaatatttcctactgtatactcattatcataaattcgatatgtttgggtcaaattagattgatggtctaagtcgataaacaaaatccgtgatccgtggttagccaaccattcgccatagttataggctaatgtggttttacctactccacctttaatagctgcaaaagtaataatcttcattttcttctcctttaattatactgtactcatacgttatgtataatttacttatgcttaatttaaactggtaacgcagcaaagaaacctgttgaaactaggtatgccgaaacagcaattactactacctgtgttactaacatccaacccacaaagcttttatcaaacttgttagccttatgcttagaaatagtattcataattgttccctccatattcatatgctatgtataagttatttatgtttagcttatatttatattatatatcatatttataatatttcaacaactatcgtttttatttttataagaattcaagtgtaaaattaaaaaagataaaattgctgttttctaacaccttctattttttaagctttatttgtaccataatgacatcatttgtatgttataatgatgtcatagcgtaaaggagtgattgttatgacatcatcaactacaatccgtcttgatgacgatttaaagagaaaaatgcaaaagaatttagatgctgcaggcctttcaatgaatgcatactttgtaatggcagctaaacaactggttttacaaaaaaaagttccttttgaaatcttgactgaaccagaaattcctaataaaacaaccgaaaaagcaatgcttctagctgatgccaaagatgagggcttggttacagatgattcgcctagttttactaatgtcaatgatttaatgaaatctttggatgagaactaatgtacactatcaaatacgagccacaatttaaaaaagactacaaaaagttcaaaaaagaacatccagagttaataaaagattttaagaatacagttattcagttaacccaaaaaggaaaagtcggaaaggactatgaccttcatccgttagataaacgtggtggtaattacagtggtcattttgattatcatttaagtgaaggaacggtcgatgttgtagtgatctacaagccacacaagaccaattcaataattagatttgtgagaatcggaaatcatggagacctatttgagggtaaagaaaaataaactatataaatacggatatatcagtatttttgatatatccgtattttgatatacgaattagaaatttagattttattctttttaaaactccgctcaccatgttgaaaaatcgataaaaacaatgctaaatgtagaaaaaagaaaaaatcatagtagtaagactttaaaaaggacggtagaactactttaagtactacaaattacaacaaaaattttataaacttctacttcattaagaaaaaatcctgtaatacagggctttttaagctaaaacgcaacttttacattttattaattagtgattcagtagttaaaatttctctatccttatactttacagcctcagcaatcgtcagtttttcaattgctctaatgtacttctccatgtaattaaagtctaaattttttgtattacttacaactggtaatcttacactatcacttcttattttggcttttgaaatggagtcatcccaactatattttttagataaagcttttctaacacttcctacaaaatattgttgaattagagggcttttatatcttgaatctttaaaatatagtgccaaattatgactatcattcgaacaaaaatctttttcttgataagttactaccatagtttttccaccaatgaaaacgcaattgccctcatcgatccattctttaggacaatttatgtattttaaaacagcattattgccttctgctgctgtcaagtatggcacattgccattttcaaggttagctacttgactcttcaatatactatgagtattaactacattaaatagatcaactattttaaattcttgaaatattggcttatatgctaatattttcttgtcttcatcagttagtccatagtcatttaatcctgtagcttttaaataggaatcaagctcggcgagccgttgctgttcaagctcggctatatattgttccatataattaaaatctatttcatctgcatcagttacaggtagcctcaccttagagtctctaaacacattatccacgtgtctaacaagaacagacagtaacaccttagacaatctactaaaaatggtattaaagtacaacgcaattttagtattaagtttaaatttgggaataattttccttacgaactgtcctgcataccaagaacgttctcgataaaagaaagtcatttgtaacagccccaaactaaacgtattaggttcattgtaggggacatcacatacaaagtctgttgtgctttcaatgccattattcaaagatgttcgggtaacatagtcatattcatttgtacttatattaggatttactaatttagacttgttgataccttttaccttttgtatttcaaataaatcacctaatttaaattccttatacttaaccattctgaccacctataacttgactaaccttccacgatagataatctgccacagtccttttaaagtcctcttctgcaggtgttgtgtcaatttttaaatgctggttataagtccaatcattgccttctagagtgattgtatctttaattactttatggtttcgttcagtatagtaattcgttttaggctttttatcactaacaattgcaactacttcttcataacgttctttggcatgatctgtatcacgtaaattaaccttctgaccagattttttacggttcattctagtatatccatcttcactaaaatctaagaaggttactaaatcatcttcttcatgtggtctagctactttaaatacataaatagcagtctgaacactagcttttccaccaaataaatcagttggcatatgaatagaggcaactaaagtattatttttaagaatattttttgtgtaaggcagcccgttgccactaccagcgttttcttgaataataattgccgcatagccttttgtcatttgtgacaatgcttcttgaacaaaaataaaaccttttccttctgcagagtatggaggatttagcaaaaacacatttgctggaaactgtgtgtaatttttatacagctcatgactattaccattaaccatattgctagatccatctcccattaggatcatgtttaaaacggctaaaatgtaaatattgcccagtatttctacacccagtaattgattttctttaatattttgaatcttgcactctagtttctgtttatcttgaattgtatttttagcatccttaaccataatatccattgcagacactaaaaatcctgcagatcccattgccaaatcccacacaaacgaatctttatttgtatgagctaacctagccatcatattcgttatgtatcttggtgttaaaaccacatcattttgacggtcattatcaattgatacccaatcatttagagagttcaaaattttaccagtaaaatctaaatgcaaatttgattcaagcaaaggaagtatatcattatagacttgcacatatatcttatgaatcaaactttcaccatttttaggttgccataaagcttgtttagtaaaaataggttgtaacaaagccataatcatgttaattttgctattttccgcttttcttgcatttaggaaatctgcaatatgatttaagataatttgtccatcattgtttctttcagttatatttccttttaattcagcaggctctaactgtgatactccttttgtctgtagccccgccatgattaaaccagtaaaaacatacaatttttcattagttgtcagtaggttttgaattgacttatcgtcgtacaaagcttgatgaattgattttatccttttttctaattcatcctcagtttctaatttaattttttcgagttcatggtcatttagatttagtttgtctaatatgccaaaaagggtatctatattgatttgcttaaacaaatcaaacgatgaatctagctgtctaatatgttttggaacaccagcattagccttagaaatataataagctttctgctcaggatcttttaaattgccttcagtatctaaagtagtaccattaattcccattatgataacttcatcacagtctgagttatctaagatcgcatttccataatgcagagcaccattagtagcatatgtagtaattgcactataattaggatcaccttttttatgtggattttttgcgttcggcttagaatctgaaccaaatttagtcacttgaacaatttgaccagccttgtctaatttttctaacttatttttgccacctttagcttcaatcattactggtactcttcgtgaatgattatcttctaataataattgaatatcaggataattgttgcctgcaccaccagatttagattcagcttgtcgcaaggctgatgtaatttcactatttatttctccagttttaccgtaatgcctaattcctagactatcaagttcactcttaaagtattcttctactttttcttcaattgatctaaccatttatcgcaccgccttttgttgcatgcagtgcgtaaatgttgacaaatgaattatttgcccataattgatgtgatgtgatcattttattctcctgttcaattcttgcaatggttgattgaattgtatgtaactttttagctaattctgtttggtgttattcctgcgtttcttcaattaatttatctaatacccttttttatgggcaattccactagctatatgattttactttttttattatatagcatgtcaacaatagtttgccatactaaatggtttttaggatcttaggcatttgatctttatttaaaactaaatttgtgaatcctattgaaaagccgtcagaaacaacactaagtgtagaaaaaataaaaaatcatggtaatacgcgtggtgctagttaaattgttttagttaacaaaaaaagtccaatcttgttagactcgacttgtaaacatattaatagaaaagagtctgactagattgaactaccctaagcttaagcgtttttctcatcctaacacaagttagttttagttgtttaaatataatttatcgctgtttgtacaaactttatgccccagatgcattaaagcaaagacggaatatcaatcgatgtaaaatatctgacagttctattctggccttgcttatttggcaggctttattgggcgttgaatctcaaagaagattttgtgaaaagcttgttaatttatctcactctcgctttaatcgcagagcacgcatgcttttgccattgatctatttaattcgacatggccttaatgaggaagtagatctgtcaggcgacattttgattattgatagctttcctgtgccagtctgtcagccaattcgcaatcgtcgagccaagatctttcgcggctatgccgatattagctataaggcaaccaaaaaaatctattattatggttttaaggttcacgctattgttagcgacgacggctacttgctagattatatcgtaaccaaggcctcagttcatgatgctaaggaaacagtagaactgattactaacgctcatcctgacaatcgttaccttttgggcgatgaaggatatttgggcaaaaacctgcatcaacgcttagagcaaatgggctatacgctttggacaccatatcgtaaaaacatgaagaatgctcaaaagcacaataagcactatttaatggcactcagaaggaccatcgagagtgatttttcgcttttgtcttactacaacgctgaaaataatcgagctagaagtttagcagattttcaagagagactcgaagttgccattttagcttataatatggcatattgtctagaacgatttaactagcaccacgcgtattatataagtttatttagatacgcttagcatggtcttgtgaatgagcattgttttgaccataatatgcattctcaccatgcttacgataatagtgcttatcaagcaagtattgtggtaaatgactattagcgtgggttaattctaatgtatggaagtcctcttctgctacgacttctaacacttttgcattatatactgccttagcaggtgtttctccccaggtaaatggtccgtgctgggaaactaaggtgcctggagttgcttcataatctaaatgacgctcttcaaaagtctttacgatagtaacacctgtattaccttcataatcttcttcaatttgttccttagttaaggcatctgcagcaggtatatcggtatagaaagtatctgcatgggttgtgttcattgctggaatatccattttagctgcggcaaaagatacagcccaaggtgaatgggtatggacaataccaccaattttagggaaatgattatacagatacgtatgagttggggtatctgaagatggatttcttgttccctccactacttcacccttcaagttaacaactaccatatcgtcaggagttaattcttcatatggaacacctgatgtcttaatgacaaatagacccttttcacgatcaattccagatacgttaccccaagtaaaggttactagtcctaacttaggcaattgcatattggcttcataaacttctttttttaaatcttctaacatgattgaaccactttctatctcactgaactgagttttttattagtttatacattttatctgtatcagtttcgcttaaaatctgatcatataatctacgattagtaataatgttaattaactgtgttagtgccttatcatgctcatggtgaaagccaggaacaagtacaatgacacactttattttttcttctatattattaacggaaattttaataggtctttttagaattccaatttcaatttccatttttcttgtatgcttagatggtgctgcgtgcgctaagaatgtatcagatgaaagcaacatatatgggccatatttatcaattaaactcaagatatcatcacaataaccagaggtaactatattctttttttctaactcttcagatagctccttaataataggattcaaatccgttccattcattagattgtcaatgatttttatactacttctattcagaagatccatcaaattgtgtttatttttatcacgtttaacagtatcttttgtaggatatagataattatctaaatcttttcttagattagaaatattctttatttgagcatttctttgaataatgctaatcaaattatctaaagtcttttctctattaatgaataactgagggaaatagtatcttaattgattctcaacttttacatgatcctcactgtccatcattgccttaacttggactacaggtaaatcaatattttttgtatttaatggagaggttgtaatgattaatttagctgtattagggatgcgtaaaattttatttaattcatcgatacttagtgacttagaaaatgtgattaatggatattgtttgtgcaaattagaataaagaatagcagatgaacttacgccactagtacatactaagagaacttccgattgcaagctatctctaatattatcgtttctatctaaaacatgagatatattatctgatagatcatcgtatgaaatgaagtacagactgatcaaagcaatttcattaattgaaataggtttagaaaacagcttagctaatggactacaagataattgtacaaacttaaccatttctgggaatttatggacaacatcagataaagcttcagaattaaagtcaaaattaaacttacttctaaaataactggcatataagtgattacttaaggctattacaaactttggagattgaatttttatgcctgaaatagaagcgtatctattaacaatgtcttgcgctacatctaaaattttgtctttaaaagattctgtaacgtaattaactgcgtcggcttgcgagcaaagaattaattcactaaaaaataaaatttcacttttaattccaatcccatatctttgcgtaaagtctgtaactgcagataaaacattaacggtactctcttgaatatcattatctgttatatctatgtcaacaatcatatttcccatagaaattcgccatattctaaatttaagaattctctttaatttagaaatagcgttttcggtaaatcgtgaggaaatatcttcctcgagaatttctatatcactttttacttttgaatcttcaataattggaaatggtaacttatctattttgtgtgctattaatccactattatgtttttgcagctcattgaaaataaaacgacttttctcttcttcagaactttttagtagatgaccatttgagtcaatatttagctttagttcagaataattttgtcgaatgtccttcaaatcatttattatcgtatttctagaaacatccatatcatcgattaattgattaatagttattggactattctgaataaaaaatttccagataatttccttcaatctgttttgtttattttcgttatgttgaaggttcttattttcattgatgttttgttgcttccaagcacttatagcttgtgcattgagtatatagcctaaatttctaacattttttataggggtaatatcttttgatgttaataaagcattagccttttttatccgataaaagattgttcgttgtgagacatcgaaatagttacataattcatctaacgtcacatatcttttttgctcagcaaaataattaattaaattgcgggtgtcaattgattccatctattatccatatcctaaaaaaatcgttaagacaatatctaaaatacttgccttaacgatttctaactctttaaactaacctttgataatttcttctacttgatcaataacgtcatctacgccaattcctgtcaataatggcaagccatttaaaactggaatcttgatttcatcattgtcatattgagtagtagtaatagcagcatctgcttcatctgccattgattgtacttgttgtacacttgtttgaactaatttgtaatcagtaccttcgttaaagcctctatcagttagctcttcgtttaacttattcatggctgctgtactagtaacaacaccagcgccacatgcgacaataatctttttcataattaaatcctcctaactttattaagcttttttagctgcttcagcttctttttcagccttaataatgcagtgacggttccacattactaagataccacaaactacaataccaataacataggcaagccacttattgtgtgccatttggaacaatatccatgggaaaggattagattcatagtcaattgatccaattaatgttgagttctttggaatagcaaagtgagcagctctagcagccttagtaaagaatggtgataagttagtaccaatccacaaaccaatgattacgttaattgcaccaataataaaggaacggaagaagtcgccgtgtgttactgccacaatcaatgggaacatgaagacaaatccaacaagtccaatggttggtaagaatttattgcctggtaaaatgaaggcaaataccaaagataatggaatcattaaggtagcacaagccaatacaactggactaccgatacctactgcagtatccataccgatgtagaattttctaccaccaaagcgtttttgagtcaatttttgaatattattagatactggtacaacaccttgtaataataatgcagccatttttggggtgataatcataacggctgacatagttacacccattaacaaaatcttacctattttgtctggccaatccatacccggaacaaagccatatgctaagaatccaactaacaaaccaattacgaaacctaaaagtgtaggttcaccccagttaccaaacttcttgttaaagtctttagcatccaagtgaatcttgttaacaccagggatcttatcaataatccaattaattactacggcaaatggtacaaaagaacctgcatatccatgaggaattgagattcctggtaatcctaagtacttttcagacaaaggtgcagttctgtcggcaattaccatgattacgaccatgtttacacttgctaagaaaagactaagcaaaatgtcatcagtcaaggcatatactaatgaacctgtaaaagcaaagtgccaaaagtcccaaatatcaatatcaatggttgatgttgttttggtaaacagcataatcatgttgataatgatacccaatggaatcattgtaacacctacaattgaaccatatgcaattgcagatgctgaaggccaaccaacatcaataactgacaaattgatatgcatgactttaatgatttcttgaactgctggattcataacatcagttaatattgtaacagttgcatttaatcctataaagccgattccgaccattaagccgcctcgaagtgctttagcaaaaggtaccttcaaacataacccaaaaatcaaaaagataattggaatcattactgttggtcccaagttgactatatactggataaaatcaactacatatttcatttaattccactcccttttagttaaagtacgatgctaatgcatcatataattcttttgaatctttatattccacaagctttgacattagttcttgttcttggaacatttccataagcttttgcaatagttgcacttgactatgtggttctttcatagctagcattgctacaaatctaacttcaacatcttttgatttatcagccatatttttgaaaaacactggctttttcaatgtagcaaatgcaataactggcttattcacatacttaacatcagtatgtgggattgctacgccaccttcaccgcttggcaaacctgttggaaaaatctcttctcgatctaaaacagcttgcttatagctttcagtcacaaaaccttgcttgaataactgatcagctaatgtagaaatagcatcggtagaatcactaacatctaattgtgcaaatactaaaccatcttttacaaaactcaatcttatttcacttcccacttcattcatcacattcatagtaaaataaaaccgcttttataaatagttcaattagccaaataaataactgcaagttctgcaccccttttgcatgcataacttgcagttttattgctcttgtgaaatttgtactattctattacacatttgcctttgcagttttaatggtaaattacaaaatctataaccattaattctgaatgctcctgtaaattaattaattcgaaattattatgaataaaatcagaaattgcaataatattgtccgcacctgttattatttcttccttttttattagctatttcaactaaatcaatctttaatatttcgccattaagcaggtatcgttcgactattttagattgatctactaaattacacattttgaaccagctaagatgatttatttcaaaatggccaataatatatgcatttacagccatttctattgaaaatacgtctttaatcattttgaagccttcttttaaatctatgccgtttatttgctaaatcttcttgcattgccaagattattacttgtcatagattaagtttttctttttgtagaaagtcattacatgctttaatagcagcaagaacaaaattagtcatttttcctccagagattttgttacctacaggctgataatctatttcaccagtctcatacaataaaatacgcgtggtgctagttaaattgttttagttaacaaaaaaagtccaatcttgttagactcgacttgtaaacatattaatagaaaagagtctaactagattgaactaccctaagcttaagcgtttttctcatcctaacacaagttaattttagtcgtttgaatacaatttgccgtttgatatacaaactttatgctcaaaattcattgaaacatcggcgaaacattgatcaatgcaaaatatctgatagttccattttggctttgcttatctggcaagctaccctaggcattgaatctcaaagaagattctgtgagcacttttctagtctgtctcactctcgctttaatcgtagagcacgcatgcttttgccattaatttatcaaatccgtcatgctcttaatgaagaagttgatttatcagatcgcattttaattatcgatagttttccagtaccattctgtcagccagttcgtaatcatcgtgcgaagatttttcgtggctatgccgaaaagctactaaacaaatctactattatggttttaaggttcacgctattgttagcggtgatggctacctgctagattatgtggtaaccaaggcttcaattcatgatgcaaaagaaacaatagaattaattgccaatgctcgacctaaaaaccattatcttttagctgatgaaggctatttaggtaaagaactgcatcaacaattgatgcagatgggatacttactttggacaccttatcgaaagaatatgaaaaatgctcgaaagcacaataaccaatatttaatggcactcagaagaacgattgagagcgacttttcgttattatcttactacaactctgagaacaaccgagcaagaagcttagcaggttttcaagaaagacttgaagttgcgattttggcttacaatattgcatattgcctagaacgatttaactagcaccacgcgtatggtaatatatgaaagtacaaaagaagaaacatcttgcatatgcgagaaaattaagacacacaaaaatcgctactctaagtccacaaatgagtaacgatttttttgtttcaccaaagtttaaaacaaaaaagctatatgcattggctaaggatagtgacgcttgtgatgttttcttgagttttgcttatggattttacgcctatggctattttgagcaaaaatcaacttttacattttattaattctaattgctaatatacttacttaatcttgacgcaatgcacctttaaccaatctgcagcaaaatacatattctcttctgaatcctcactattagtaatatataaaataaactttaatgcatcgtctttatcagcttttaagtgatatccattttcttgtaaaaaaaacgccgctgcataataggaagtccgtttatttccatcagcgaagatatgctttttagtaatcttctgtaagataaaagccgcttttaaccataatgttggatataattcacgtccaaataatatttgttgtggctgtttaataacaacgtctaacccctctggatactgcacacctacagtacctttaccagctttttcaagcaaccgttgattcaaatggattaaatctgttttggttaaatagatcatttattctctaactctcgtgttaattctttattttcttcataaaattgatcaataaagttgtccaaattgggattaattgaatcaactattttaaacgtgatcttcttaccattaggatcatattctttttcaagaactgttccatcttctacatgaaacttagttaaatcttgcttggttaaacgtacactcaatgaattaccagctttaaaaactttagttgtatcttgtaacattttaatcacctgctttgccatttaattgttataacgcaataatacgatgttataacgtgaatgtcaatattttaactttttttattatatagcatgtcaacaatagtttgccatactaaatggtttttaggatcttaggcatttggtctttatttaaaactaaatttgtgattcctattgaaaagctgtcagaaagagcactaagtctagaaaaaataaaaaatcatggtaatatgaaggtacaaaagaagaaacatcttgcatatgcgaaaatattacgacacacaaaaatcgctactctaagtccacaaatgagtaacgattttttgtttcaccaaagtttagagcaaatatacttaatgctttagctgtatgttatcacgaaatcaagtggctatcataatattgtctaaagtcctcggtactgaaagcacctgaagttatttgtacaatttcattaagcgctttttgctcactgcattttcgatatatcattagacgctttgttctaatcttaagcgaatgaagcatccattttatattctcatctaccagcttataatgaccttcaattaaaagagcttttgcggctttttcatactcgtatttcttcatatactttctcctataaactgcttatcaagaacacggctaaattattgccaaggtgacttacgtaagagaaggtcaaatccttagtttcaagataaactaaagctaagacagacccacatagcgagtacaaaatggtatatagatcaatttgcggttcatggatcagtccaaagactattccattaacgagaactgctaagtagactgttgactttctatttggcttactaaagaaccagttaaagaaaatacccctaaaaataatttcttcaaaaagtggtccaattgcaatcagcattacattaataattggattcaactgttgctgatgtgcagctatgtttgcttgattagtggcttcccctttaatcaaaaatcctgctaaaatttgcaaaatacaaattactaaaaatccaagaaaagctaaactccaattttttaaagtaaatcttggcattctagttttattgtaactagtaaagtgccaatcattcacctgattaagtcttctttggtaaattccgtaggtcaagctcagtaatgcaaccgttaatccaaatataaatataacggcaacccagcttaattgtttggctctaatcataaataatccttgaactaccgcataaataaggaaagttactatcatttgaccaataccaattgatttatcaagaatcttttttttcatcttttagttcctttgatttttttatgtctgattttagataccctatcgacaagagaaaaatataaattattactgaaataccaaagccgaccgtcgcaaaattaatattggaatttaaatgcttcgtagaaaccttgcaaattgattgcgccaaagcacctgcgttagcagaaacaaaaaatgcaaacatagttgcaataaacagtgctgttcgtcttagaaaggacaaaatcatatttattttcataaactacctctacttagcaaatttctcatcaaaaccaaaatattttctgccattgtatttcttattgggattaggcttaatctccattcgataggtacctttacgaccattgaaagctacaatttgcttttttcctgccgcaattttcttaatctcttcaggggtccaacgatgacctcgatatgttttcttaaaatgatattctttaccgtctttatatgtaatcactacatagacatttgtatctacaggtttaggattaactctaaagccccagaacctgattttacgtctaccttctttcaattcttgttctatcaattttccagtagccgtaaagctttttccttgcttatcagtcgcttcaaaactgatttcttcacctgccaacaagctggtaatttcttcctcactaaaagcatgttgtccatattcttttttaaatttaatctctttagctaaaggcttatagattcctttaacgtgatcagtatcttcaggaaactctactttccaaccaactctggtaatctctttacccgtttttttacttttatacgtttgttcggctaaataagccgtatgttgttcttctttaccaaatttttcaatcgaataggtgatttgtttcccttctaaagcttcttgttgctccacttcagtagtcgtatgtccatcaaaaatcgtaactggtgggtttactgtttcatttgtttgagtaaagactccgctaaatctttcaattgcctttaaatcaccagctaattctttaacttgtgcatcttgatttaataatggggcattttctatcataactgctttatcatgttcaattgtcttttctgcaactgagtagaccatatcttgctttgtgggatcagccttaatttcattcaaaatgtcttgcaagcgttttgtaatttttcctgaagacaaataggtatctttagctaagcaagcaatcaatgcgccagttcctgttacttcaaaaacacctcttactacttttaattggggaataacttttttattttctttaccaattgcttgtaatttactaattgtttgcattttagtcgcaccagtacccaagttccatttatccaagttattcaaaatgaaagttaaagtaggtttagttggtggcgtatttgtaccttgatatacttcagggctagcgttttgagcaaaatgtgtagccttattttctgattgcttttcttcatttaaatcattttcgttaaaaatcagcttatagtttagttccttaggaacattaatcgtacttgtaaaatcaggatgatttgcaatatgggctttaacttgagtatatacatagtcctcagctaacattgctagatatgatttaacaactcgttcataaatatctcgaccacatttaccatatttgtcttcaactttttcaagtgattgtggtactaatttggtcggacgattggctccgtgatcctcactcttaattatgaattttttgcgtgggtctttatgacttaagagttttgaatcaattccaacgactgctgcaattttatctgcatatggtagtaactcgttaaaatcatcaatcgtaattgcgttgtcttctgttctcggataagaaacaatcttatcatcatacattttttgataagtatcagtaatttgttcagttgtatattccttttggaaaatcttacctaagtcagccaagttgactaactttggcggctgggttcttttttcagttgtgctatcaataataatttgatcttgagaataattagttaaatcttgacctactagatttttgtctgaaaaacgccaagtatcaccgtcttgatagtcacgcttaaatgtattgccgtttgcatccttataccttatttcatagaaaggctttttaacgtatgattttcttgctctgttttgctcatcaactaagcacgtaatatacgtctgcaagcgtcctattgaaagcgccttacctttattactataaccctgttctcttgccaactcagttgcaattcttgattcttctaatcctgttagaaaatcaaatctctgtcgtgattttccttttactaaaattccttgagcatcttgttcactaactgtagccttctcaggcttatgtaaggaatcaattacatagttagctgagtcatcacctttaaaacgaattcgccagacttcattttgccagtttaaataatctactatttcccaacctaatacatcaccttcaccagacgggtcattatcgcttgcaataataattacatcatgtccaggcaaattgctcttaatattatcaatgtatctttgcttggacttaataacttgctttgaccaatttaaatcgagaggattccaaggaaagttatctaaattctgccaatccgcatatttagctgcaaggttggggtcaaccatttcattaggcgcattgagttgtaataaatgtcctgcggcataaacaatatcatagggatttccttcaaattcgccactcattccacctaaataatccgcaaatttttctgcttgagactttttttcatttaaaataagtaatcttgtcacgttactattcctttctacaaaaaaagaatacctcacggtattcttcacatagcatactcattattcaaaaaaattaattaatggaggtaactatattatatatcatttttatgatatttaaaagcttagtaaacctgcttaatgctttccaaaataactttattcatttgactaattatctttctaaagtagttgtacaattgttgatcattgttacaattgaggtacttagaataccaataaaagtcgattcccttattttctaatctttccttttctttttgataaatcttatcactaattacataaccataatttttaatccaatcttgattaatataagtaataaagtcgcttgcctgatcatactttagtttttttacgtcaaaaccataattaattaatttctttttgatcacaactaaattatcaattctgttaagttgagctggtttaactaaatcaatcacataataggaattaaacaaacctcgtaattccccttctttattaggtctaacaacgttgaacaatatatcttctaatcttgtgacttctttcataactgcctattatttctccttaccataatataagcatctcatttatatcatatattgaatttatagtatacgatattgcactaactaaaaaaataaggcaccagattatatattgttgcttatatattaagcataagtaacatatatactaattataaacacgcaaaaaacagccagctctaaatacaataactttaaagctggctgttttaacataaaattattttttagcggttttacgaagaaacttaactaatctatgtgtgtcttgatcacttaatctacctatataattaacattagtatcttttttagataccgaataacgtctataagtatcaatccacgaatgttttttcaaacctgtagtttcatattcttttattttgaaataatgctttttaattttttcggatttattcttaaactttgtcgttatgtcaaagaaaaagaacttatcctcattttcttgtaatatgaatattggtcgtcttttaccacctgaaatctgaacgaagcgaacatatactgtagcaatatttttactcatcttttgacatccattcttgcagtttctcagggctatccaggtcttctgttgcccaatcttttgttaagttttgaatttctaattcatctttctctctttcagttaaattggttgaaaatggtaacccattctcagcaataagacgcttatagaacattgtgatagcaatagtaggtgttaaacctaatttttttagaacagcattaccttcttctaccacaccatcatcaatttgtacttgaattctctttttagtaattgaagccatagtagtgcacccctcatatcatttatactgatattatactactaaatcaatggaatcaacctatataagagtaatatttagaaaattatttactcaccacttgttcaataaattactaactgctttgcaatcctcatatcaaattttgcatttttgatattttttaacgatccaattcctgttcacctttttgaatagcaatttcttttgctttttcattggtcagcgaactgtttactgtagcaacatgtggcttgctagtttgcacttctttatcatcaagcaatttagacttttcttgatttttttcaatttcattttgtaaattgtcggttaacttgctatagttgccatctgctgtccagcactgcgttttattaaatgcatcatccaaatttctaactgtatctattgtcatacttttttcgatttttcttagtgccgtcaattcggtcttaaaattagttccattagtctcattgtcagtaacttcttgctccattttttctttttgcacataccattgcgagtgttcaggagtatctaagaagttttccttgacaatttgacccaatttttcttgttctttttcgagtaacttatcggtactattagttagtgtcttagtagctgaaccaacatgcgtcaaaatttgcccttttaccccacttggtaactcattaaacttttgtccgttgcttgtccaattagctatataatcaactgtctcttgcttaacatcaattccataatgagaacaataaagataacttgtaagctccgcttgcatctcttttaattctctaggcaggcccttttcttgtttttggctattatgtagctgtgcatgtcccaattcatgagcaagcactgatacattctccgttggagtgttgtatccatttaacacaatttcgttagtagccctgttaaagtatcccttagcattttgcggatccttatatttatcccgaatatctgcattaaatgggtcataagtaatgactggcattttcatgtcattagctacacttcttaatccattctctaaggagtcaatctgtcctggattcttcatattaaaatcttggtgtctattagggtaaagttctgggtatttttcctttggcatattggtttgtggagcatcgaatacagtgccaatcttataaaaagttttttcctgaattgtcaaattaagtgcaacagttaggttatgaagagatatattgcttgaagagttcctctgctgtgtgatattggaggattcggcgatatttgtggttaatggcatcagttgcctgttgaacataagcttttgacttgtctttcatgctcttgcccttagggaagaattgacgcaaaagaccattgcagttctcattggtgcccctttcccatggagaatatgggtgagcaaagtaaatctggcagcccttgatcttggtcatatccgcaaactcagagccattgtcaaacgtgattgatttaaaccaggcaggatgtctgtcaatctccttttgaagcagcctttggcatgtgcttgcccgatagtcaggaatcttgataactacttcaaagcgtgtggttctttcagtcaaagtcattaaagcaggctgattcttgcgtctgacgcctttaaccagatctccttcccagtgcagcggagcttttctgtcttcaatctctttaggacgctgttcaatggaattgccaagatgcttcttgtgcaaagcgtgaccgccatggctgtgatgacgcttgttcctgcgtcttttgagcttcataggcagatcaatattgcttatgtccagcaagccctgatcaatatagcgatagacggttggtgtgctgggacaagggtagcctggcatagtccttttgaattcaccaacgaactcatcgatgctggtggcatcaaatttagctttaaagcgtctggagagcattctcaaaaagacagcataatgcttcaatggattgcgctgatagcagtttttgcgacgcttctcataataaatctgtgcagtatcagcgtaatagtgctcatacaataaatagctgctgtctctttgcaggacacttccgcgtttgatttcgcgactgattgtcgacttatggcagccgacttcttgagcgataacagtacgggaagttatgccggaatccagcattgcttgaatttgtccacgttgtacgctggttaattgatgatagtgcttagaaatgctagaatttgaattggtcataaagatcttcctttcttgatttttcgtcacttcaagtttaggtcttcatggcctttttgtttaacacttagtgttgcacttcaattttaaatccgggtaaaaagttttttggtaagtttctatattacccgcctcaattttttgtttttcgtctttagtggcagtctttaagttagctaattctttgttgccatccttatttttacgatagaaaactgtagctttagtaggaacaaatattttaattcctttttcacctttgttgaccttatagcccatgcttttaaactttgcaaatgatcccaccgcagtcgcacctgggcgctgcatctgaatcgtcattgcatttcttgaggaatagttatgaaacttatccataaaatcaagcatttctataactttctctggtgattgagtataattatctacttctttaagtagtccattttttaaatcctcaacggtttgagtatgtttctttttccaagctttacggtcaaaagtctttctaggtcgtctttcagactttaaagcatttttatccatatccattttatctttaacttgacctgatactaattctggttttgatttttgaaggcgatcaagatattgtgactgaagtgaaatatcatcattaagactcgatatctctttatcagttaatggtgctgcccaatcagaagtaaaactagatttattccaatctacatctgctaaagttccactttctttttcactatcaataactttttgagttagtggtttaataccatttcgattaatcgtgtgccattgataatttccttcagcgtttggtgaaaaaagataatgatactctacatctgaattaagatacttaccgtcattctttgatatatcattaatcatcgcagataagtcatgatagttttttctagcaggatcatcgattctttgtccattagaattatattcatccataagtttagtagcagctgtaggattttctggaatatggttatcgttatagttccctgtttcaattaactttttggcatcgtctaaagtacgataattatctagtaaattttgtcctgtgaaagtaagtccaccatccatatgaaaatactgagtagtaactgaaccatttggatttaaaattgatacatttgatcgtgttgacataatttttcctttctaagaaaacaaaaaagacgcttcataatgaagtgtcctgactacatacaagttatttagtttttactactatcaccttctttctagtaattttaaatttacacgtttctgctgaagataatttactgtcttagctgagaataaaaaacgctgaagttttgataattcaatgatttcagcgttttttataccatctatttaagccttggtgcgattctttaatgttacctatctaattcttgattttggtagaatgatttaattcttttagtttttaggtcattaatgtcaatatctttttgcgaaatttcgttgctcaaatgatacgcaacttcgttcttgctaggtaaagtttctatcattcggtccaaagctttgtcttcttgttctctagtatctgcacgataaaatctcatgaggctaatcataaattcagcgtggtctatgttgtcaaaaggaagggttaaataatctctggtttcccaggtatctcgagcagagtttgcggcaattagcgctgttcttttatttccgtcctggaatggttgaagcttggataagcttgcaaatactctccacgcatctttagtagtctgtttagacgagttgtattgttcaattatttcatctaagtcttcggggtagacgttttctggagcaaagtatgcacctttagctgtgcctttagggtctgtgataatgacaattgcgtcgtctggattataacttacatgtcttaagcgccctggaatacttgggtcttcttcttcgctatgggtaaaggctttattaatttcaataattccttgtcttgtaaatccgaatttctttgctgcagctatgccatctaaagcatcttttaagatggcaccatcgtggtgttgatgtacaagcttagataggtcattaagatctaaggctctttttgtttgcaacacagtactactgtagtcattcatactaccaaaagagactatgaagtttgcaaggtctaggttttcactcatttgttctcacttactttccgtttagttagattacttacaattttagcactatttaattaataatccttgttttttgagcggcacatacgcaagcggtatgtgcttcttttttacattaaattagcagttagtttttgattagctgctctttcttattatttatctttctaatctttgatctcttcttcgcataatatgatatccatgaggtatatatttaacctgcttattcaaagtttgttctaatctcttcactttttttctcctttacactacaataaatttaattgaagaagcaattttcaaattaaggttttgaattttcaattcaggtggctcgctgccttgtcgtatggcaaaagagagcgtagtgcattgcttttcaaaaagtccttcgatgtttggagggacttttcttttacactttttcttattgaatatgtgttaaaaaaagtttaagaatagcagtagaaattaaggatcattacttgatcatgttgcccactgccttgacgatatgctagtcagaatgtctattattcattaatttatcctttcatgttacaatgtaggtaaagatcacagtgcaaattaaagagttgtatttacaacttggctgcctactaccttagcgatatgctagcttaaagaaggcgaggaatagatcagtgagactcattaaagagcggcacatacggaaagcggtatgtgcttctttttttgcattaaattagcagctagtcactgactaactgctttttctatatgcttatctttctaatccttggtctcttctcaaataagccgatcgcttttcaaattcttgtcctggtaatgttctggttgtatgcttagatttttgttttccttgttgcattttccgaaaagcttttaaggtgtcattccaatctttacctaatttttcactaggtttacagtatttaactttaggaaatttagattgaatatctttaacaaatctttttccagcttcatcattatctacacctaaacctacacttttaagaattcgaccttctttttgtaattgtgctgctgtttgtgttatatacgagtcaaacacttcttttttaaggccatccattgaaacaaacctagtatttttcattccaccctttacttttaccttagacaagtcaaagaaactaattgcatcaattggtgattcaaaaaatctaatattttctggagtttttccattcatacctggtgaatcgaatgaaaaaccatatcccttggtagaatttttttcaatcattttgagggttcctcttctaccatatttttgatgattaatttttgtaccttgttttgatactcctttaacttgtcgtctatcttgaggatcaagccacaaaaaaagtgcgttacccaatttatcttgtgcaagcactttgtctctatgtaattgatctatagtttgactcgaaattccacgttgattgtgcaagtatccccatactcgattaattttattttctgaatctatttgatttttatcaaacttgaaaggttcttttttaatttgataaactttgccatcacctactccactagttaacaccttatccattgcctttaggaatttctctttttcatttaaattgctacctgacaattcatacaatgtagaaaagcttaatgcaccttttccatgaacttgtcttgaattccagtaaaaagaatttttggatggtgtaattaccaatgaatcatgttctacccctttaaattcatcgctgcctgtttgacgtaaatcaattcctgcactccttgcatattcaacaatactcgctgaattagctgccttaatttgttcctttgtaaaagtaagcatttattttttctcctattctttaacgtcaaaaaagcaagtagtaaaactacttgctaatttccccacctatacccgactaactatatagtcacaaattaagatgattctattctaattctcgttcaacttcattttgcaatttctcaaattcacgtaagttcttcttggtttcaatatctgcatttgtcttttcaaatactttttcttggttagatttaatttttcgtatttgactttgactgataaaaggcttttttaagtaaatatgtccttttagattttttctacgcttaataatatgtgaatgaagtgtatagtcgtcatttgattttatcttattattttgtattgttgtatccttacgaatttctttcaatgcggattgaatatattcgtttggatcaactttatctttaaaattaatcctatgtctttgattatggttagcttgcttatcaatttttcttaaatcagctagcaatgcgttaccatttcttgcataaattccttctttgccatatagttggttaattgcataattcttattttcacgtttacttttaccatataagtcttgtcggtcatcttgcattttccaaactaagtctttatatttttgaaaatcggagttatattttagcaattcatcaaccaaatgatccgacatctttttttgatttttatctaacttgttgtaaaaccattctcttcttgactcaggcaatgctctaacaaattgatttatctctgcttgaaaagttggctgttcaacttgactagtcaaattaacctgaattgcttctctaatagcttgacgtctctgagataattctttagtcatctctgaagaaccaatcaactcattagcaaaaccacttttcatatgatcaattattttttgtggtcgcctacccttaggttgactaatcccttcacggtttataatttttcttcttgggtctttctcaactgttgcaatgtgaatatgaacattatcagtatttctatgaatggaagccacccagtacatctcatttaatggtggatccatttccttttgaaaaatactctgcatttttttagttgccttttgtagttcttcctcatttaatattccagttgtactagataaaatccccttcttttttaaaaaactattatcaaaactaacaacatcttgccacaagacagaattattctcttgtccttcatttaattgctcacgaatataatctaaatctttcaactgaacaatatctttgtcagagctaaatactccatctaaaactttttctttggttggatgaatttcactcagcttacttgcagcttgccctattctttccaattcagtttgttctttggtatttagtcccgtttcgttctttttctgatttaatgcatcaattcgtaccatatacccaagatacttatcaaattccttatcattcaaatcaaaaaaatttctcttttccattaacttttcagcagctgcttctcgttcagaatgttcttcactttttactctagtaaagttgttttcctgatttaattttcttacttgttttttaactcgacttaattcatctttttcttctgcagttaaaaattctttttcttctaatgcttcttttctggctatatatccaacgtaacgtccaaaagcttttcgtgaactcggcacagaaaattttgaagttaaaattatagctggtcgtcccaaaaattacctcctacaaataaaaattctataaagcaagttgattaataattattttgctctttcaattttaaaagccgtagaatcgcaatctcagcatcaaaacttactcaagttgtccgccattttcctccattctattattaattctttcttttacttttctctttgcagatttataaacttctgcatcaattccatttccgacaatttgcattccttgagtcatcaaaaactcacttaccatttctgttagaattgcaacttgttctttggtaaatcgctgttgttttctaatatcacttaaatcttttgtccacttagaatttttttcattttcttctgctaacttcataagatgatgaattacttcagcattattttttaaatcgtgttcctctttataatcttgaatccaatctaaatctgtatcagaaattgtcgctctaaaagttgtcttaatcattttttctggtcctcttaatcagcgtaagtttcttgtctttttttcaaagcattatcaatcttttgattaattttttgtaactcttccagttctttttctttttgaacacctaacatggcattgaagaataagaacttataaagttgaccattattatcaaagcaatgttcttttctaatctgcctaatttcttcccattgcttatcgttgagtcgaaattgcaaaaagtgctgtcgtcccatttcttgccctctttctaaatttaatcatcttcttttgccgtgtcttctgacaaactatctaacaaatttaatgctcgttcggtgtcattaacatctccactaatgaaatactttgcaagaacattcagccctaataaattttcctgcagaagtttattctgcttctgaatcaataaactagtttgcgaatcttcattttgattttgaaaattaattggaatttgttcaatttgttctctcaaaaattgatttctggaaattttcttacttgaattttgatttaattgattaacaatccgatcaattctagccaagttttgttcgctgattccacggattaaaacttttaccataatttttctttcctctgatttctagtttctagttttccttctagtttctactctgaaatttgactaaaatctgcttcttttagttatctctagtaaagagcataagggaaatctgaccccacgccttttatcaaggtgtgctgggcttggttgtaccaagcgatttcgcatttttagaagtgatatcacttctgattaatttgacgtctatatacttctaaattgttcgtcttttacctgacattacgtcttgatacgtaatgtttttttgtaatatccgaacaggacgtattcttacgtagctcattacgtccaagacgtaacattttttagctaaattttgcacctaattatcaaaatcaccgtccttaatgtctctgattgtgtcttcatatttagaaattgcttgctgactttgtgtgatagctgctttgttttctgaaatatcattttccaaactactaatttgtgtttggtaattttctttttgactatcaccaactttttctaactttgcctttgcagaatctaaattattttgagaattttgaatcgtagcttgagcatccttaattgtattttgttcttgactaatcttctttttattccaattaatcagatattgacgataatcaaggatatagttttgatagctcttagttactttgcttgaagtcagatcaaccttattctctttaatgaagaactcaatataattattttcagagaaatcttgcatgttaactcgcttattaactttttgtggcagaatatcaacctttaaatctccaaagccatttttgattccgctaacctcaattactaaaaagtgattattgattttctgtgatttgatcgcaagctcttctccatcttctccgccacgtgacatgtttactactcttatagcatactttaagttgcttaagtctgaatcgtcactagtagatgttacgtctgtagagtccccaagataatactctagcaacatcttttcgctttgcttattgtaaatagaatttgctaggtaaaatgatgaattgcctgtcactacattaacagtttgctcagtgtcaattgattttcccgtccaatagggactagcaacgattgcaataaaaattgcagccaccactccaatgaatgataaataaattttgcgatacttatgtttttggtgtcgcttcaattcatttttgtttttgctttgaatcattttttgcctttctaattgtcatccgaatgtacacgatagtttttgctatcatttaattcctgttttaattcagtaatctgctcctgttgatctcgaatttgtctttgactttctgaatctggattatcacgattaaagtaaactgttgccattagttgtgctgctgataacaaaaacaaaactaaggcaactaatttcaaacgatgatttgatttttttagtttagttttttctgattgatatacaattcgactagacatttttaatcacctcttatgacctgatctatcttttctatgttagttcccgtatatttttctacttgttttccatactttaaatggataaaagttggtaccttagttaacttatactccgtaatatacggtcggttttgtggttgattagtatttacaaactgtatattctttctaaataaatcttttttcattacagcgtatgaaaaaatagaacgacagcttttgcagtcatctcgataaaataaaactgttgagtcatcattagttttgattttaacgatgtttttttgatttagttcatgattaacatgttgattaaaaccaataactcctatgaacaacaaaaaaatcattgcacaactaactgcaatgatttttaccttagtttcttttttcggttgcatcttaatctgcctcacgatcaatttgatagcgaccaaaatacttaattgaagtaatttgattagtcgctgtatcataaatcagctggtaagcatcagttggtgttcccaaagttctatcatcttttgtcatttcaaaataaactttggcatatacaggcacttggttattttctaaaatacctgtcttcaaatctagttcatcaatctgacctgtcatatctgccccactatattggagctctaattgcttatcatttttaaacatagaattgttctttaagactttttcacttactaaatgtgtatctttcaccttgtctggtatttttaatttttcatcaccactatcatacgtgtaaagcagttttagcagtttacttacctgtttcttggcttttgtctgtgctacatcctgctcagctagtttctctttgctgcctccttccttcatagcaatatgcttttgcgaatttccaattttagcatctacattttttaactcatcttgctttttagccaactcagttcttgcctgatcaacatgatagtcgatagctttttgcttgttagtctcataattgattacgcctaattcgagcatgattccgaggattgctccacctaaaagatattttttattcatcttagttcctctctatgttgatttctttaaagctatttattctttgggtcttaagattataatcaaagtcccaaccataagtaacttcttttttattggcactttcgactagggttactactgtaatcttagtatgacttacatctgttaagtcaccaaagtaaaccgttgtactcttgtttcttaaataaccataagaatctccattatttttgatgaagtttttgccctctttacctggaaaaatttttgtccaagcactaaattcttctttttgtttagctgacgaaaattttcttttagtatagatagctggtatcacttttagaaacttgtcacgtgcctcttcttctgcactcaccacatcaaacttttgtttatatgcagaattctttgtttgactattttgctcttgaactatttgcttctcaacagttttaatttctgccctaatatcattcagttcatcatttttaggaactctggcaattgcaaacattcccagaacagcgaataatactccagctgtcatcatccatactttcagattggactctcgctcctttttctgctgcttcatctttatccttctttcttggcattaataccaggtatgtttcatccagaatttttgtgcattacgccatgaaccatatctgccttttacatatttatttgctacccttgtttgattcttatgactgtaatcaccattaagatattctctctttaattgataacgtccataaacacttgggttagctgggttaactgcgtcccatctacctccagattctctctgaacaatccagtcacgtgcttcagattcagtttttgataagccatcatcttcttcagattctgcatcattgttcaaaccatctttaattaatttaattgggtctttccaagtaccatcatctttgtacgcagagagctctgcggtagcaaaatcttttttagttgcaccaatgtgaacgtgagtaataccatgtgcattacttgctaagtgacctattttatctcctactgaaactttgtcgcctacctctaccttgacgtatttcaaatctgcttcatcaaagccgaattcctgataaatgacattccaaccatcggagccttctacccagacgtacattcctagactatcttgagtatgtccttgaaatgcaattttcttaacggttccaccatgaattgccaaaatatcttgtccaccatatggaacagtaccaaagtcaacaccatcatgaaagccacctgttcttgtagatgacttaccaaataattgctcacctgagattgtattacctggtccttttttaggaattgacttgaatggccacccccatttgccgcttattggcttacaatcttcctcagctgaattatctgagtcactagacccatcacctttagctagtgatttattgcctttcaaggcatcatattttttagcttgagcttccatacctgctcggtaatcactttcagctgcggtatagtatcctgcttttttcattgcatgagcatattgagcaactgtagcatcttttcctaatccagcttttttaaaaccgttctgtactgttacagcccattcagttgcaaaatcacttaagttcttgtagtgaacataatttccaccttcactaccacgactttcacctttggtaccgatagtacttccttctgaataagtcataccaccaaagttatgatcatgttttgcaactgaactatcaccattacctgtttcttgtcccatttgagcaaacagcaatctagcactaatccctgttttttcatgtacggcatctgcaatatgcatcatagcagtttgaccatacttaggtgactcaatgacgctgattcgccctttaactactcctccttgttctccacctgtatcacactcatcgtctgaagatgcacccattgctgcaattaaaattacaataaaatatataactgataaaacagctaaaattcctaataaaaaagcggctaatccagcccatctttttgtctgtcttaaccgcttaatacctgttatcattattgaccacctgcaaaaatttcaagttgtcgttcagatggtttcatcttgacttgatatctttctcttcctcccatcgtgacaattgcttgtcctgtttgcaagtcaggaatgttactgtaatctgaactatttaatgcttcgcctaatagacttttgattttcttaagttgagatggatccatactcattagccatttgtattggcaaagttcaaaaaccacttttaaacttgatagttgagcagattctactgaatcaggaaccatttcttcgggtgattgtgtcgcaaatataatacctgcattaaactttctcatttctcgttcgaagtttttaacataatcaaccgcaaaaatattttcataatttatgatgttatgacattcatccaggaacacatcaaaatactgtacatcttgacgtgtgattttccctgcctttaacagagcattctgttttctaccatttatcaatgcatgactccaaattaaacttagagccatatacaattgtgcctgataaacattttgattcattgttgaaatagcagaagaatcaaatagtagaagcttagtatctgtcaaatctctcattgtagaataaccatcaaataattgaccgtaattctcaatcattgattccaatgctaccttgattttttcataagttcttattctttcagcagtaaattgatgttgttgatagtacattggcgtagccaatttttttagccaatttaaaaactgactaaaagtcgggtatttttcactatctaaattagtaatttttatatttcctttattttgttgaaaatttctaggtaataatcccatgtctacataaaatccacgtaacaatgaatcaaattcttgcatttcaatatttacaaaggatcccttattaatcatttggaatagaatatctaccttagaaatatgttggtaaaaacttgctagctcatcaaccttacctgtattttcatctacagtagttgccattacttcaagtggattaatcataccttctgatccatccaagctaaccacggttccaccataatgcttaattaaaggaatatattccttagtcttatcaattccacgaaagtacatatttctagcaattgtaccttcaaccaacatcttcattaaagttgatttaccagcacccatcttacccaagatcatcatattaaacgatcttctgatattagttgatctaaattgatcaaaataaaaggctcccccagttgaagtacgacctaaccagactcctctagggtcctttaagctttgagctgaaaatgggtcaccagctccaaccgttaaggctggaattggttgttctggcaatgctgctaaatccttttcttgctctgtgattggtaatgccattgatttaaactgtttatcttgcataaacatataaacagcaacgttataaccctcgcctcgaagcttgccacgaagattagaaactgattgatctaatgcttcaatcgttggagcatatacaaagattctggttagcattaatttgggaatttcgccaccttgacttaattccaatgcatatttttccaatgattgcatatctttttgtgcatttaaagcatcagtggcttttctagcattaacttgccggtcagctaattcttcaattgatctattcaattgccgcttaatttcatagcccgaatcagttttaacgtcaattgtagttaatgttgaatcgtttaatgacacttgagtaagccagagcaaaagcggatcattaggataatggattacagataaacaagcagcatatccatcacttgcaattgcataattatccgcaaaagtaataccgccctgcggttgtacttctgctagaaacttagtattgtaaccattttttagtaattctctttgctttttcaagctggtaacttgtcttggatttagctttacagttacctttttcttcttgtgtctctttgttttcaataaactagaaattctcattttttctcccttacttactattcaagttgttttctctaaagagtactttaaccgtttcttcatagtccaatggtctcaagcccattaacccttgatcagcaaattgagcggttctagtgttaactctaatatcgtgcaaatcttctccaaaaatcataatgtaaaactgcacatcagagtaatcttctgtatttcttgacagcattactgattgcaacaacatttcattaactaatcgtaaacgcattttttcatatctggttttgggtgaacgaatcccattctttaaatggcgaaaatactgttgttgttcactagtatcaattctcgtcgacatgactacaattttataatcgttgctataaatccgattaaatgtagtaaatgaatctaggtatttacttctggtttcatcatcaagtgaatataaatctgtcgaatgtacacgcaaatagcgtgcttgggtgccatctactaaatcaagtatcccgtcttttgagcagttactatagcccaagtattcaactattgattgatctcttgcatcttgtcttgatcctttatctaagccaaaagctctaaacaagctaggagctttgctcctactgtttctactttttctttttgttcgcattattttctccttctaaaaataatggataatatctgctttggtcttgtcgcataatgcttaacaaaacacgataatttctaatctttggcgctagaggggttcgcattactagcagaattcctactacaactccaaaacctgtcattactaattgccaagtcggttgtaaattaaatagaaaagaaatttgttgtcctgccatacccccaatgaaaagagcaaaaacatcaaacatatctaggaaaaagatttggatagatacattagttgacttaggaatcattattttttgatatttatccatgcactaatcctttcttctgctatctccatgacctaatttgccaatgttggtagaacttggtgatttagtttcagtagagttttcaacttgctgattgattgtggtcttatcatgcttaatttcagtcaccgtgttagtattgccttgagtttcaacggttctattagtgtttgaaggtacgctgctcttcatagcatccttcacactactcattccttgattgcctacatcatgagtagatacttcagttctgccagcctttctttcaatatctacatggttggtaccagcagtttcagttactttactatgactgtcttgtcccttaaagtctgaaacattgcttaagtgtctaccgccttcaccaactggttttggcggtgtggtttgttgatttgaacgttgttgacttgccaactcactagtggatttttgagtatctctcaagcttggtaattcatcgaccgcattactacttgttggtgagcttgaagagctatttgcttcaccacgctttgaacctgaaccagtaacagaagcactgttagttctaggatcatttgctgtttcttttttaccagtctttgaaccattagttgcttcactaactgtggtatttggaatttttgcatcattaccaattgtcttagctccacctgttgacttaatagagccgtcagttgaactttccttagcagcatttgatttaggcttgctatcatcggtcttaatgccttggttttgaatattatcaggtttaactgatgtattcttaccttggtcatttacatttttagctgaatcaacattgcttgttgcaactgtttctttcttgccatcatagtttggatttcctacaaatgaagtatcacgtccaatacctgttggttctgcactgccaccattcttttcagctctgttttgcatgtatggattatgatgtaaagtgttgtactgattatcagttaaaccaccatttctcatcattctagcggcttcatcttgtacagtttcagatacagcgccagaatttactgccctgttccaatcaactgcactgccaccattctgcttaaagtcgttatgagctgaacgaaaggctcttcttgcataactgccagcttgttttgcttcactattgcttgctccattttccttagcaatagccttagtagagctaccagcttgccaagcttgagcttcaccaatcgctgcccctgctaacttaccagaacctctggcaactccaacagcgccttcagctaaatttttacctttaccagcaatatattcagttgctgcaattcctccagcaactttactccaaccttgcttaagtccagtatccaaaccaaagaatttttgcaccttgcttgaaccttcccaaagtgcccaagttaaagcaatcattccaactgcatataaataaggattatcatgaatctttcctgcatctgatgaactcatccacacggctacaattctatagaacgctaattcaaagccttggaatgcaattaacaacgctgaactaaaaatatcttgtaccgcagctttagtacgctttccagtttccaaatcagtggagaaaataatgattgataatacttgcataattgccaattccacgaatgctcttactgaaacaaagcaaactagtaagaaggcaactgtcattgaaagtaaggcaactacaactgggaaaaattgtactgaatatcgttcatatccaccgttaaaaattttgaaaaaggcagtattgctttgacttactttggttgcataatatcctgaatatgcttttccctttacatttgatttcgtaccaacgcctgtaggagctaatttataacgcaaattgtcaggatcccatgctggtttttccttagacttatttgctttattacttaatttctcagctaaatcagctgaaatagtagttgataaatcgcctgatgttgcagtatcaaaatcagacttgttcatagcaaatgaaccatagtgaacatctttttgtctctggtctttaatttcaccatttttatctttagaaacaccttcccatttggtattagtatccccattattgattttgaagccactaaaattattagctatgattgctaataggtcattagaattggcttgtactacctgatacggcaagcttgacgtccctttatcattatcagcctgtacaaagcctttatatacacctgtagactgatcaaccacccaatttgtaattggctgaatatttccgattaagaacgctgaaattgctaattgccaaacgacattttttaattgaggagctttacttgaggtaccaattttaattccgacccaagttaaggttaaaatcatcaaccctgcagcaattcccattaccccattaattaaattagtatttaatcctgttgattttaagattcctgagaaatccaaactatctgttgctagttcacttgcccaattggcaaatccataaaaaatcttaactatgccccattttgtctgattcaaaatacgtcccaaaaaatcatcataatgtaaataaggtgccgcattttgtagagcttcagttactttttgtaatttggctggatcataatcacctgaattggttgatttttgccaccaatctaccaaactactaaaaatatcaagatacttaggattgatgaaactagttaaatagaataaccaatttgtcattaatttttcctttctttaaacaaaaagataagtagtccttatcgctacttatcttgataatattcattaaagctttggctaaattcctgtgttaactcattcttttccttgttcttatcttctaattttttatctttatagatgatattaacaaaagctattgaacttggtttttgtccttcaggcacatcttttaattttatagcctcgttcaatattgcttgttttgttccatcactaatatcaccatcatgttccgttaaccagttcgtgataaatggtggaatctgattttcttcttcctttaaagacttcttcatttcttgttcttctttagcatctttagtagttgcttgaacatttgcgtcactttgacgatattggttatacgcctgcaaagccaaattttcttcttctactactgcatttccatcttcatcttgtttggtaacttgttcagtccaagttaaccatttgctccaatcgatttctaatgcttttaaattaatattggcgtgtgcatcaatcttttcaactaaatctggattagttttaggattaaagtcatcagttaagaatgtatgtgcaaacggcattaatgtttttcctgtgttaaaaataggatgtgaaactaccgcccagccccatttattcattcttgttaaaggtctcaaaactaatctttcaccgccagctaaatgttctaatcgttctggtagtatcaacggtactttatctacgctaacactaacatttttggctaaaccattttgatctttagaaatattgcttgtctcaatcgttttattgccacaagcttctgaaaattctttgttagtagctgaatcagtagacataatcaaacatttattctgacaattttctttaataacttgtccgtcttctttgccatacttactgtagagctgggcataagactggataactaaagtaaatagaatattacgacctgctgaaactgtcataatctgatccatattctgcagcggaatcatactaccaaactcatcaaaaatacattgtactcgtctaattgtctttccaccttgaaccagccgacactgacgtgataattctgtatataattgattaacaaaaattgtagctagcaagttgtttgaagcatctgaatctggaattttcataaagactgcaattggcttatcactataatgcatcttaaagttttccatcttaatttcaggttttcctacctgacttacttcaacctttttaactttaggattaatctttaacttaaaagtattcttcaaacgcttatgtcctgcaatagctttaatttcaacaaagcttcctgtttttagattgacatcaaagttgttttcaacaaatcctttttgactaacacgaatctcattcgttttcagttttttattatgattatctctaaaattgattttaattaactcaccatatagtcgttgatcaagcaattgaaactccaaatattttggaaaaccaattgatttcatttctagtgtgttcatactggtcatgcgtgagtttttcggtaaagtgaaaatatctagtttctgtacaacagttgaaaaaattgaacctcttgccttatcacctgagaaatttgtggaaccgaattcttttttagcaatagacccctgttccaaatgcttaaagtattcacttaaaacgttgtgttgagtatatggatctgatggattagtataatctatctgtcctaactgattaactaaatcagcgatatttacaaaagtaatatattctggatgggcttttttatctctaaagtttttaggattcatgcaatactcaatcaaagcaataatcataccattaacagctgattgtgcgccgtcattaaaccacttgttttgacctgcttgtttatcaaaataaagcgagtaggtaattgagttaactaattgcattgctccttcaacatcaccctgctcccaacttctaatgattaactgtagcggattaaatgcgattcctttgtttgggtcatctaaatttaattcataaacatcatagccacgcttcctcaacgtatttacagaagcaacatacagttctcctttaggatcattcacgactagtgacgattgtttttcagccctacttactaggtcgatttgttctaatatagtagtttcacctttaccagaccgtgaagtaccaacaatcaaattatgaaccgtacttgtatcaatgaaataatagccatgtttagtaataaatggaaattttttggttaatcctaatctattaatgtgagcaatggggaacccaccaaaacctttaaagctaggctttttaggatctgaccctggttgactatgatcaggcacttttacataggtgtcttctaattccttaactgtagtaaaacgggcatttcccttttgcccatgagcgactttttgactttcaaagtggaatttttgacttaacaatccaccaataatgacgctagcagcaaatacctctaaaatttccatgggcttcaactgtgtcttaaagaaattcaagccagctaatcccactttatctaaatcgagaccattcgtgaataagttatagtttttacttttagtttgtaacatgacattatggaatgctcctaataaccacattattactagaaagataaaaattcctataaccaacgttgttatcagcttcgtataattaaaattaatattgctagactgcttgttttcatttttgggacgatgtaattgtctttcaacttgatacaagcccttttttacaagattcttttccttgtttctagcattttttagatttattcgtgatcttctttttttagtacgcatatctagctaaccacccatcttgccaatcagcaatatcatagaaagccaatgcgacagcttttttagctgagttggaaatttctgttcgctgatcatcagttaaacttagccaaatatcccttgtctgagctttgtcttcattagcaatggcactgtacaaactagcaattggatttgaatatattgtagcaatcttctttaaatttcttgcatcaccttgccctaataaaccatctagcatatctctcttttgtgcccaagtcttagtttcacgatattgttttaaaatagcttgtgacctagttaaataagttggagtagatttagtctttgatttagcattagttttttgatttttagcaatatcttttttagcagattgcttactacttgattgcttgtttttcttgacatgcgagtttgaacttgatcgttcaattgaagctttttgttcattattagaatggttattagtataagcccatgtaccacccaaagccgcagctgcaaggcaaactaatgagataatttcagatttatagtgatgtttcttagaactgttatcctcggtttctggctttaactctgaatcttcttcatttgattcagaatcaattggtgcatcatttttcttagtatcatctaagtctactacttcaccatcaacatgtggcacaggcactaaagcattctttccatcattatttaaagtaatttttacgttaggattttctaaattattttgagtaattgctgcagcaattgctttcgcaaattcctcaggcaactttgccatattttcttgttgcaattttgccaaagactcattctgctcaattgctttttgctttaaatcaagttcacgttctttgcgagcagcttctgcttctcgctgacgcttttcttcagccttttcttgatcaagtagcttttgttgatttatttgttctttagctaatcgaactttttcttgaaccttctttaaattgtcttcaaataaatcattattcttgtcatagttatttctaactgcatgatcaaaatcattactaatggttgttctactatcatctaactcagaatttcgtttttgtacttcttcatcacgcgcaacacgttctactttagctttatcagcctttaattgctcatcaatttgttcattagcattacgagttttaagctcttcttgatcattaaaatttttcaaagctatattgcgtttttcttctaattgcttcttatactcagctaatgcggcttcatcattagtctttagttctagtgccttgttttcttttaatttactcaagtcagattgattattttgcttttgatgagttgctttaactatcagttgttgaatctgtgccgctgttctgtcttcaacaattttatctagtgactctttagtaactctgttatatgcttcctttaatctatctacaattgcagcctttgatttcgctaaaccttcatcatatacacgttgaatatcctgcattgaataatctcttaacgcctgattgattttatcattcaactcttgttcatattgatctttagggttatctaaatatcctagatcatggcggatattatctaaagcaaattgatttttatcatatcctcttggtaaacgatcaagaatatcgttggcatccgtgtatttaccataactaattacttcactacgattagtttctgtttcagttgtttgacctgcttgaattggtaaagcatcaacctcttcaggtaattgtgtaggaacattattcaaactaggattggttgcggcattactatttgattcttctgttggactgttatcctcagtctcatcatttacatcattttcaggaggtatttcatcacgcacttcatcatctgaatctagaatttgattattattaaacatgaacccattgtctttatttaaatcctcttcatcatcactcaaactaggttcaagttcattaaagatttgatcctttagtgttgttactgtttcttcttgatcacgagttaaattttcattctctaaatcacgatcaatcaagtttaaaatacccccgtcttgatcctcaggtaaaatttgtgcttcaaagctgctctcttcacgatcctcatcttcatcatcaaagatagtaaatgtaacattagaatcagcttcttctaagctctttgcatagtctttaactgcatcatctgcagttttaatgtctaactcaggcgatttcctacttaatttatgcttaaattgaaaatattttttcgccccttttggtaccttatcaaaggtaactaatagcataatcttctctccttcttcaacgcccaccatcaacccagtaagtcttacttacttcaccttacttataaattaactatctagcattccaaccaaacatatttgcgaatgatggtactaaacttgcagctaaagcaacaatggcaacacctaccagtgcatacatcaataattgctttgcattttgcgacattctgttaccaaaagaaaaaagaataccagccaagataataacgacaatgaacagacctttggcgatattcttcaggttcttttcggtactaccagtagccttattaatatttctccaaacatcaagtaaaactggatgttcgtttaaaaaagcctgggtaccgattaagccgctccaaaataagtaggtcaatttggtataaacagctaaaaacattgttaatcctccttgtataaaaaaagcatttagttagctaaactaaatacttttacttgtcccattaaaatcacttgtaagcttattatcatcttttgatgacgtaaccttatcatttaaagtcttatcaggttcagcaatctgcaatttttctaactgttctgataattcttttttacctgcgacttctaaaactgcatctttatatgcgcttttagtgcctgagatcaaatcttgcacaaactcaaccataattttttcttcccaagccttttgtgttaagccttgggaattatgtagcttgcgtaaaatggacttgtcttgtttgctaagaaccatttttcctccttaactattgcccaccatctcacccgaaagaaaaagaaggattagactttctcaccatttcatctaatcctttatacgttattcgtctttgttacctggtaatgtttcagtttcacgcttgttgtctttatcagtgtttttattcttgtccccatctcctgttgggtcaacatcttcactggtatagtcgcctgaaacctcgatcttcttatctgcagaagcctttggtgtctttggcgatacgtgagtaatattacttggaatatcttccttgttgaacaagaagtgtgcttgatttggtacttcaatttgtccattatccttgttcaggtagtcaagcaatttaggagtattgattaaagtagtatcaatgaacatcttcaagtgcttaccatgccatttaccaggctcggttgctacccacgaaatcttaccagtcttattattaacgtctaatttaccttgatcagtaatttcttttgctttaccagcactatctttgtcgtcatagtcataaaccttaacgctcttaatgttttgaacgtctgcttcgatagcatccttaattgcaagagaatcaacattcacattatctggtacagtagcttctacgcggtaggtatatttcttgccaaagtctacatctctaagtgacttagaatcggctaatccatcttctgaaacaaacttttcatcctttggattagtaaatggaatattagtagttacttgattagaatctgcactaccattatcttgaattactttggcttcattgtaaattacagcttgatctttatgttttggatctgcgtgatcctttaagctctcaccacgctttacagttgcatcaaaggtaatcttgtaagtttcattgtagaagtcatccattgccaaagcatcagattttgcaattactgataagttattacctgaggataaggttactgtgaaattgtaagtaacatcttgatttgcacggttataaactctaattgagcctgtatcaatattcagaatattatctaaattatcagtgattctatattctgtatattttaaacgcttttcaacatctggtacagaatgtgtaatttgatagtgatattgttcatagcggttatcaagcatatcatgagttactgatttaattccaccgacttcactaggtgtatcagttccttcatccttgtcagaaacatatttattaggattcattggtttatcttttacaattggcatatcaaacaatcttaggtaagcatggttaaaagtaccattccagatactatttgaaatagaaaccttatccttatcagtcattccagcatcaggatcatatttaccttggttcaattgccaattatcagtatctgcttcaatttctgtttggttttcagctgcatgttttcctgttgtagtaccaaaaacccaatacatattaatatggtctgtgtttgacattgttgctgtatatgcagccttccaatctgaggatcttacagtacctgaaccatcaggtaaagcggtatggtgttgattggcatctgaaaagatgtaattattgcctaaagtatttttataacttaaccaagtattaccatccttttgtccatcgccccaaataacttggtcaatcttaccataagttgatgtatcatagcctacccattggttaccatcaatatcacgtacactttgatttaagttcaacttcaaaggtttacctgtatcatgatcaataaaatcaattctataagcaaccgcaccttgtccaggtgtgaaaacttcaaaatatggacttacaccaaaggcaattgttggattctttaatggaactttttcacgtttaccatcagatgtatcctgccatttgtaggattgaatattccaatctgttgcggtgattttgacatcaatagtttttccgctgttaggatcaacaccagtgtttgaataataaacaccaattttcccagctaatttttcatttcccataacagagaatgcataccaagagtgatgtttgtcttcagtattagtacttgaagtagcccaatcttgtgacgcaccaccaaaggcatggattttagttacaccctgaataatcttgggaataaaggcatatgaacctgccatttttgttccaactgcgttttgtcctttcggcaaatttaccatttctgcattatccgcatgtacaatgcctgatctagtagcaagaaatgtgcccagactaaagccagtagccattagtgcaattgcggctaagctgactactttgtttttcttcgttagagaaatcatataatttcctttcttttgagtaacaaaaaaagaagagccgtttttatttgtactcttctttatacttaattattaaattagattatttagttagcattattccaagcactaacccattctgggcttgtaccatctgcagtaaagaatgaaattcctacactactaccttctccatcccaataataatgcatgcttaatgctgcatatgcattatgctttttccaaccatataaaactcttggctcgattccttcactatttttcatcatatcaaataatttatcagcgacttgaactggtttccaacctttatgagtaaaatctccaccaattacaaagcctttatgattcaaaccataaatagttgaatctacatagccaacagcttgatccatacctaactttgttaagcctggaagatatgctcttatttcattaatattttggctaattgtatcagaaaatctactaaattctctagtaccaggtatttgtgcttgttgtgctaaattagtcaattctgaactagtcttgaatgctggataacctttagatacacggtaattttgaatatcttgccataaacgatcttcaatttgttgaacctccgtatcagtaaagtatacatatacattcattttctttctagctaatttttctgattctgcagtcattggaccatctacaagtgaactcttcttagtgttatatcttacaccagaatcatcactattagtatttataccagatgacttagatgaagaactagatttcgaagtagtagatgatgtacttgtttttgcatgtacactattacttgttggaaattctcccttagtactggattttgtaaatccattattagtagtgctcgatgacccagtattataacttgaagttgaacttgtattagtagaagcaaactttactacgaaattagcagtacgaacatatttgttcttgccaatcttgtaatatttcttgcccttaatcgttttcctaccaaggatttttacaagtttgcctttctttaatactttcttaccaacacgtttaccctttgcattataaatataagcattctttgtcaacttctttttataggttgctgcttgtacaacggttggggtattttcaacattattattcactaatgccacagagctaacagataaaacagctgctgcacttaagctaaccaataatcttttcttcatttctagtatcctccaatatataatacgtggaaaatttattttcttttttctacctacattatataccgtttttatgacaaaagcagcagctaattacttagtaattttagtaattaaccctttaatcttattcttaaattcatcattagtcttatacaaataagtaccaattccaccagccattgcaactaaacttgcaataatccagcctgcatgttgcaagataaagtgacctgttcttggcaagaatccatttttacctgtaatagggttatttgatcctggattgtttgttcctggattatttggattattaggattctctgtgctattcgtaggattcttaggattgttgacgttgcttggtgacttcttatctgcttgtggtggaatgacattaactgtattagacttaacgtctttgccatttactgtcatatcagcagtgtttggtacttcaccattaaccttagaatccttctttaacttagcagtgatgttagctgtaaatttcttaccgcccatcttgcctactaaatcagccttaggcttccatgagaacttttcagtattcttatcaagcgtaagttcaccttggctagttacgtcattaccatcagcatcagtaatggttaccttttcaagatcaaggacatcttctaagtcgtccgcaaattcaacagatttaacatcttgtttatcaccgacagtgtattcaaccttgtagtcaaagtctttgccttcttgaaccttatctgattcaccccattgacctgattcagccttaacttgcttatttaccaagtttccatatgggtctggggtcttaccatctggtttagaaggatcgttaggcttatccttcttaggatcttcagggttctttggatcaccattaagcgtagtatgaacaacattagttggaatatcttgaccgttaatttgcatatgacctgtattaggaataccgctattgtcatagcttgatacatctgcattcggtttaatgttagaagcaattgcaacatatagtttcttacgtgagaacttagctggatcattagcagtccaagtaaagctttcatcctcatctgaagtaactaacttaccttcgttagttacattattaccatcactatcaatgatgacgacattctttaagtcaagcacattctccaaatcatcacttaatacaagtgatttcatattttgagaattaccaatatcaaacgtcaacagataatctacagcatcaccacgtgaagcttgattgctatctactgttgaagaattaataatttctttcaaatcttccttagaagttggagatttagtagtaacttcactagcgttttgtgatgaagacttaacaggattcttgtacggcgtttgaagaatttttacagcttcttcatattgcttgtctgttaccttatcgtttgccttgctccatacaccagtatttggatcgactttaacgtattcttgagccttttgatagtcctttggcaatgcaccatcatcataagagtcttgccctgaggaagtttcagacttgttgccaaagaatttcgtccaatctgcaggattcttaacaattcctttatgcgtcttaggttcctctacctttggggtcacaactggagtatttgatggggtgtctttaccattcgccttaaagtgagccgtatttggaatttcgatggtattgtttttaatatacttttgtaaatctgcattgtctttgactttagcagtaacttcaactgtatatttcttgccaggcataaccttaaccaagtcagcatttggttgccagttaaagctttcattcttttcatcaagcttaagtgtaccttgttcagtggtaatatctttaccatcggcattcttaacaactaccttttcaaggtcaaggacatcttctaacttatcggtaaactcaacatcggttaaatgttgcccttcacctgcagtatagtcaatcttataagtatagtccttgccaacctcaacattgtctttatcttcatgataggaacctgatagtccctgaacactcttaactaccttattttcggctggaggtggagtttcaaccttaacaggatttgaaggaatatctttattgttgtacttcatatgagcaacattaggaatttcgtaattctttgttgctttattcaagtaaccacttaaatctgcatcggtcttcagcttgacagtaatatctgcagtgtagatatgctttggcatttgagttagatattctttagaaggttgccaagtaaaactttctttatctttatcaagttttaaatccccttctttagtaacttcatttcccttgtcatcggtgatcttaacgtcttcaagatcaagaaccttttccaaatcgtcatagaaaacaacattactaatgtctttaccattttcaggaattgaatattgaactcgataatggaattcatcaccagcgtcatgcttggctttttcaccatattgaccgttcttatcctctacttgcttaattgcagtaggttcttcatcattcggtgtatgaacataaacaggtggggtcttgatcttttcatcgttatagatcatttgaccaacattaggaatgttgtattgattcgtattcttatccaaatacctgtctaagttagcattcttttgtaacgtggtttcaattcgcatgcttaacttcttacctacccaatcttgaggcttcttagccgtcatattggttgtatttgtccccttatcaaaatctgccgtaaattgatcagtaacatcagtgttaccatcaaaaactctggttttattatgagtaaacactggctccaatttatcgaaaagaaccaatttctttagatctacattgtatggaacttggtagtaaatatcaaaagcaatatctgatccctttttaaaagtagcatcactcacatatttcacatcagctgctgcatcagccttaacaatattagggttcgcattatggtttgcgactgctagacctacgcccacactacctagagttgctgttacacctaatgcagatagcaattctctagtttgcttttttgatagctttttcaaggctattcctccttaatttaacaaaaaaaacacctgcatttttgtcaatgtcacaaatcaaaacattgattcatatgtaggtgttttctaataatatacaattattggcaattacttgtcttttgataattgcttgattttgatagaaaatggtttatttgtaccatcttctaaccatgcataatcaagttgtgcattttcactatcagcgagatcattagctttttctgtatcatagtgtaattcaatattattgtcatacaactctcttaagcaagcataaccaagaattgccaagaaataattcttatccttagtcttatcttcaaagacatctggatacaaacgactcattctttccattgcatcaatatattcactttccaacattacggtttgaaaagcataaggtctatctaccgctgtataaggagtatatgctacatatggaaaacgtccatcatacttgctagccaaaccttccgaatacttaaggaataaccagccagcccacagaattcgaactgaggctactcggttatcttttctatctactagccatgcaggaaacttctctttaataattttatttgtatcagcaagcatagcttctggtaattcgaaatctacaaaaacttgttttgtcataacattttcctttctaaaaattaaaggagcctctaacatacttagaagctcccttataatcttgtgaaccagtgtatttaccacgaataaaaagtctgccttgacctgtccagtcacaagtaaacaatgatatcactggttttttcttaaactctttattattccaagctaatcttaaattataaactgaaataaattgtgaagatgtgatcttgtaataataaactttcttataatctgttagtaagattgttgttccattaggtaaatttcctctgacctttgcagtatataatgggctaaagaacgaacgcccatcatccatattatgacctgctaaagcgtagtttccttcacccatcttttgatattggttcattgttcctgcacctaagttcagttccacattaccaactccacgatagatatttaatagaacattatgatctcttattgctatctgtcctacagctcgataatctcttctatgctgatatgcattggcaagagattgaggtgatacaggttggacagccttcatattaaaacttggctttttcttctgtttgttttttctttgactcgacaaatgattagttgccacatagttagcagcttgtccttgaatatggtcaaaattagcaatgcagtaaatcgcaaccccaattaaaattaacgcaataatagctattactgtaccaatttttttctttttatcactttttcgctgttgattaatagctaatctacttttttttattttcattttaggaacaaaaaaaggcaattagcataactaattaacctttatttctaatttctacttagcagcttcccaagccttaatccattctggcgaataacttcccacaacggtaaagtttaattccaaaccgtgatcgatataatctccctcattattgaatctaacttttaaagcagcataagcatatttatctttatgtccttcaagtgttctcaagtctatgttgttgtcttcttttgtataagcattaaagatttcatctgcgactttcttgggatctctttcttttagattaatgaagtgctgtttcacattattatatctgaaggcatctaaatcattaagacttctcgcactatccattcctaacgcctttaatttaggtaaaaatttagctaaggtatcagtcttttgaaatgtaccaataccatcacctaaagcgttatattcaggagtacctttttgcataattcgatttacaaagttattcaactctggatttgtcttgtaggcaggataacctttactttggcgataagcattgattttttgccataaataattttgaatttgggatacttggtcatcagtaaagtagatataacctttttctttgatccattcttgttttttagattgagaatttgagctattatgcttattgtcgtttgcagtactattcttagaattattagtctttttttctgctgttgcagaattgccagtagtattacctactgcagtattcgtagcattattgtttactgggttattagcaccttcagccgaagttgattgtgcattcgtagctttcacatattgaccattgcctaaggacaagtaatccttgccattaattgtcttaacaccaactacagtaaagacatggttcttctttaaagtatcagtgcccttgattcttttgccttcagcgttataaacataagcattgtgggttaaataatattgaccgctagccgtattagctttactggtcttcttagcaaaattagcaaccttaacgtattgattcttaccaatgcggtagtatttcttaccataaatcttctttgtaccgagaatcttaactgttttgcccttcttcaatactttcttgccataacgattgccattactcttataaatataggcattatgagtaagcttgccattttttactgctgcttgtacaacatttgtattattagcaacaccatttacttcattaacacctactgctccaactgataacaatgttgcaacagataaacttactaatacattctttttcataaacataatttgctcctctttccttcaaataattcagcttaaattactcgctaactttttcccgctctcacctgctttcattatactacatacgcaacattatagcagcgggatatccgttaatttttattattttaaaatatactcttgcgtacatcttccaaaacgatcatatgtaaaagataacttcacttgatcattctttcgggaaagtaatgcacgtaatgctaatgtttctttttgccttaaaggtgtaaaatctttagggtattccctcgctaattgattgcgataacggacatactcatccgccgttattattgtaacattcatttttttcattacatcaatcaatcgatcaacgcaatcaaaattattcataatttttcatcttaatcccatttaaattgtgatctctttaattaccaacggttttgcgctatgaccgataacgatgatggttttctagttagccaccaaactgtaagcttttgtacagtacgtagcagatagcttcacctatctctagcctctcgcttcacgcattccgcaagctgtcctcttatcaatcctaatcaaagactctttcttgcccttcagttactacaacacttaaagagttaagtttatcgactcacttactattgttgatcacattccgacttcttatttactcttgagtttttcatcaaggtattcacatgtcaaaacagccaaaaagaatgtatgcttatcttttagtagcctattacagccattactattactttaaatttaaaatttcgttcaaactaagacttatcatcaagccaaaaataatagtaatctttgttgatggacggctattcccatcttgacgggtgtgattctttcttcttccacctttgtgtgccttcaattctctgtcttgcaaatcctattgagtcggctcaatagtcatgcacacgtcctacgcttgttacaaagcatagttgacgcttattctgttttcaatgtactaatggactgtttaccagccctaaaagaactagctgagttgaacagctaaattaaagatcaaagatcaataaccgtaccgactttcttaatgattaatattctaaagcttttacttcttttacctggttagttacaactactgctacaataattgctcctgtcacagctaaagcggttaaagcaaccttgctaaactttttcacgtttatcatctcctctgattatcgtttacccatttttttaacgctgctttatcaattttgccttcttgatagcttctcaacaattttaaataattacttctagcagcctctttttgtgtaattcgttctagtagcttatcctgttgtttcttggctttcttaagcaacctattaacagaaaagcttggtgggaagccttgatttcttgcaattgtttcattaacttctgctaactgctttctcaactcatcaatttggttatcatagctaataaggagttctttaggattatcatccatattcttcttcaaatttttcatatttgaatacgctcgccaaacgtaataaataatatagattcccactgcaattgttataaatttatacatatttttcctcaattagattagagcggaaagatttgaactttcattgcaagcattaaatatgtaaaagattaagtagatatttttagatttattttttaagaggagcatctctttttaacttgcgttttacctattaaactacgccctatttttacattaaatagctccaataatacccgataaacaaaatcattatccatagaataatccacaagatttggagcaatactgttactatttcatctagcttttcaaaaaaattagcaaatcttgtgcctgctaaacttggcaaagatgatattgccataagaataattatgaatagatttcccgctccaaatgagatcactatgtttcgaaaatgttctattataaatgaactgatcataatatcttacctgctaacatcaattagcggctttttcctatgatgatcgggatattttcttttacacaataacctgcgatgtcctaatttaggatttacttcaaatccaaagcctaaataaatttgatcataaatctcatttactcgataaaaggttatctctttatattttatattggttttatgatatttgaaagataaaaaatattttgggtcttttataaatagtccatcaacattccagtaatggtacccgtctatcgtcagaatttcataaacttctttttcaactctgaatacgctaaagcgcctattttttactgatttttttgccatccaatactcaccaatcacattatctccatcaaaatggtaaatcagcatctgttaattgaacttctttttgattattaaaaggatcttccgctaatttatcttgcttatttgcttctacaatagttcgatcaacttctggctcttcatcttccatattattcatattttgtttatttgtattttgtgaagggctattggctatatcctcattttgactagttaagatatcaaatgaattgacccaaatatattcatacgctactctattaccatttttgtctacaaattttctaaccctttgttcacctgccaagattacttttgaccctttatgtgtattagctactaagttttcagcaactttattccaagcaattacatggtgccactcaccaacatagcctctttgaactttactataacggttttgacaaatagtaaaggttacatacttttttaaagattgagtagtttttaactctaaatcttttccgatgtagccgtcaattacaacttgattaatcattttttgttcccctcttttaaaatgttttgctatttatattatatatcgcttttacgatatttcaagtgaaaaacaaaaaatatacagatttgtagaagaagtaaagcaaaaaagacgctaacaaacttggacagtttgtagtgactttttagtaaattcatacttttcttcactagcttcatggataacatttaagagagcttcgcttttattttctcaaaatatttattttctatctggctaacataatttctcatatattcaaaatctaatattccattactcttaacaggtaatttgaattccgcattataaaaaatgctatcaacatttcttacagcttgtggatcaaatttcaatgccagtctttgcagccatggtagtagatagagtcccactttttcatctatttcaaatttcggttgaatgacttttataaattgcccactataccatgaatcattttgataatttacattcatttgcattaatcccaagctaaaagttttttctggattaagatgttctttatcaatgaatcctgtataacaatcaataccgttgttatttcgagttctcgttacatatggataattacaaggcatatctttatttaatgatattttatctaaatgtggagcggaataaatggaaaatagttttgcagaagaaaagcttttaaaattttgcatattacacctcttaatccaaaattttacctaatttaaacttcatataatttcttattgctttatcccagtcttcttcttcaggagttgtatttactttatagtggttttcaaaattccaatctgtacctgtattatctattacatcttcgacatattgtttctttaaatcccataactcattatgaaattttgaattattaacggctgcttgacctgattttaaaagcaataaaagatcgtgatacctattcgcaggactgctgattgtcttaatcccacgtttggtccttttataaccatcatttctaaagtctataaactttacgcccctatcaaaatcatgtgggaccccaacttcaaatatgtaaattgacgtacttacaatagcattaggcacaaacaaatcagaaggcatctttatagaagctaacagtgtgttgttctttaaaatttcctgattagtagttctagacttgccgcttcccgcactatcttgaattataatcgctgctttagcacgctctttattagacataaactttgatccatatgctaaaaatggcataccataattgtccgcactaaatggaggattcaataatagcttatttgcattgaattctgtatataatttagttggttctttaaaagtatcacctttctttatttgactagacccatcaccacgcaaaatcatgtttgacgcagctagcgtatacatttttgcatcatactcaacgcctaacagttgagactttttgatttgctgaattttcctattcgctttttcagaattagacccatatgtgttattggcatcatcgatcattaatttcatgctagaaactagaaaagctcctgatcctgtcgctaaatccatcaccctatcattcatacctacatctattgcctttgccatcagattagttatgtatggtggtgttaatactttacctaagctacctccatcacctaaagcgtactttaaaaattctgaatacattgatcccataatatctagagaaccactgtccgcatcaatctgtaagaaaatttctttatacagaaaggtaaatacttgcttagttatgcttgccttttcagtctgaatcatctttccaacaattttatctttatcaattagcttatctctatctaaatcggaatgaatcgctccttcgaaagaatccatcattaacttttgtttatcttgagtaatatttcctcgtttatttaagaaatcacttaactgatcgattattttaatagaatcgctttgtttttcgctttggattccttgtaaatcacacggtgttagtcctcccgcaatgtattgacctgttttagcatctgtaaccttttgcattgccaaaagcatacctgaaacatatacaacacgctgttcagttgatatattcaaattattcattagtttattcaataattttgcttttttttgcaatttttgctgtgatttgactaatacctgatgcttttcagtttcagttaatagagcattatttaggaaatcttgaaatgcttccttggtggacaaaaaatgtaaattatcgtattcatacatacgttttggtttgccattgacagcataaacataataaacctgttgcactacatgatcaggattatcaccagcaacacccactatgatacatgacttatacatctttgatttaagaattgttctcgcataatgtaacgcaccattgacagcatacttttttatagctgattgagtcgtagaaatcctacctttagcatctaacttgattagatacttagaataaagcttattttcaaagagaacaggaacatcgtattttgttatattaaaatctggctcaccaaagttagttttatttagtgttttagctccaccttttagtgcttctttcagatactcgtccatatatgattcaataccatagtcttttttggttaagccaatctcttcttccaactcatgctcaatatagtcatccacttgtctttctagcttgtaacctaatgtatctgacatttatgccgcctccctttcgaggttaatggcagcacaaaagagcgtatttaaaatatatacgctctttactaatcctattaatagttcagataatcctaagatataaattttacagttgagatagctgggggctgtacccccccattctggaagttattctggatattgttattttttgttagcatttatcttctagtcctcttattttttaagctgtagttagtggcttaaatgttattactgcatgcaatcctaatcctttagcatatctattaagagtttctaagctaggaattgaagttaagttttcaatcttagcaagttgtggttgtttcataccgattcgtttagctaattcaacttgagaaattccttgcttgatacgctgagcatgcaggtaagctaaactatcaatagctgtcatttcttcaggactgatcgatgttaattccttttttaattcgttccaagtagtcattcttattcgttcctttctaaccaatcatctaatctgtcgagggcttttgctatttctcgtggatctgttttattgttttttttagtgtaatgactcaatataacatatctgtctttcttccaaccagcatagaaaaagcgctctggtaatggtcgaagctctagtaaaggatgacgataccctttcagaaatctagactgaggcattcccatatggttacctaactgttctaacatgctaacttgataagaaaattttgttaaaacctgtttatcttgtttttgattgcttcggtctaattgacgaatatactccttcacatctgatcttccatactcgtcctcataaaaatctacctgatacatttcaccctcatataactaatttgatatatattgattatatagcaatcaggctatgctatcaagaaaaagtatttgaaaaaattaacgtagtgaaaacagttattacttttccctcgaatcttgtgtaagccttctaaacatcttaggattaggtaaactgataaatatcttgctgtacctattaaagacgtacggacacctaacttcatagccttcatatctattagcattgctgatttttgtaacaaaattagtagtagagaatacttgtcttttacccattattaaattagatattgcacttctcccctctagtttgtcatataagtaaattgaatcgctatgtttatactgaataatcccaatgtaatttgtagtcatgtagtctaagttagctttttgcgctaatttatgtgctttaacaacactaattattctttcattcatgttatgctttttccttgctttcttgtcttgtttcattttccgcttaatccaagcaccccccatagataaccccttaattcctagaaaaatcacaccaattatcagtgcaattctccataagccatccatcagtgttaaaagagctggaaaaaccaggtaaattccgaaagctagccaaaccaatttccagagatggaatgctgaagcaagaataaagacccaaaccataatccaaaaccaatctgtttgtgaaagtactaaaaacatagcgttctccttagcattaataaactcttattacctttgtctgaacttgaggaatattacctctagtattgataactacttgcaaatcggcttcaatttgccttgcttgcttagccttaaaaacttttatttgatttttaggtacgattgccttaatcactatagggggatcgtcctcaaaagaatgatgatcatttgataataattctagcatcgaacatccttgattcatatcaacattcattactttaagcgagacagacttataattcacagtttgtttgtctcttttggtaactctattaacatacttttcttctgcgtctgtcttgttaaagactactgctatccaaatcaaactcgtaagaaagtaagccaaatatatgcttaaaaataatttcatagctagctcttttcaactactacgagccattttccttcaccaacatacttaatcttttgattagccttaatgctgataaaatgaccattaagctgcttaacgcgaacataaaagctattactatccaacggttgaattccaagcacctcacttctaaagcgccaagtaaaaactttagctaattctgcaggtgtagctagcattccaggatataaatcatatttattcatcatgaacccccgacatattcatataatctacaaaagctttctcaatcaatttacccatttttgctagatagtctgggttataaattctattgtttaatacttctggactgtttcccattaagcccaatgcttcccctgctaaatagctgtttaactctagcttccgcttactactaagtcgttgcccatctagttcaagatcatctgccatgctaagaaacgcaatggaaaacagtctatcttcaatttcttgaatatcaacttttccatcaagcaagtcttgtgcaacttttttatttttaggattcattcttacaacctcatatccgtctaattatctatttatcaatatcttacgatcttatacaaaagtatcgcaaaaatgatatattaataatgatttactacatagaatttaaatttttaaaggggcatattatgaaagataaacttaagcaatccatcatcgcaattactagtgccaatctcaaaagaattttgtacaatcaaaaactaactcaaagagacttagcagcactaacaggaatctcgatcccatcaattaatcgctattatttaggaaatggcgccataccacaaaataacttggtaaagatcgctaaagccttgcatgtttcacctaatgaacttgatccttcatatcagcccactaaagactttttatctcaactagctgaaaaaactgatgacccagatttaaaatttagaactgattatcttaaacagttaattcagaccagcaatttatctgttcaggaaattgccagtaggctcaatataaagcctattacagtctataagtggctggcaggggtaaatacccctagcaaggaaaatacagccaaattagccgatttatttagcgtcagcgttaattccttagcagatgcctctaaagaaattcgattaactcctcaacagagcaaaatattaaacgctctgccatcagatttaaccaatcagcaaacagatctaatcatttctctgatcaaatccgttttagaaaatgctaactagttttcgatagattcatacatgcttgaaattccactaattagtgctagctggcagttaattctccattgccaccagttaagtatgtattcgacttgatcatttgaatctagcatggttactgagctagttgatacttgcaaatctgaatcttctaggattgttttaatttgaattgcaagattatctgacgttgttttggtttcttgcttaactttaaggtgattatcgcttaaaatgtcgcttaataaacgtgaggactctttcaaattcagcatccaattagaaggcaacaagtcgtcaatagcgtaacctaactcatctactttgaatataaacttttcaaaattttcttttttacctgttaattccatttatttctcccaactgattaaatctatagctctttgtggagcgttatttgtttacatgtttttgcattttatcttagctggtaatttttgcattccagtcaatctcgtgttgatgtttttgcatccactcacaagcttctttagcaaaaataattgtagttttaccagctggcgtttttctggggtttactacgaatccaccatttttataatcaacttctggaaattcatcgaaaataaaagttcttacccagttatcacctttgccacgacaacagtattttctaaactcatcgatattccaagtcttgccagttaagtcttgcttatctgcactaacagattcttttacaatacttttaattagattcgtaaggcttggaaggttgattaatgtgtcagacatatcttcttgcattgctatccccagctttcataatttctatcatttgctaagccatctctcagcatctttaacaaatagctatatggtttacctaccatgtcccatgtcattctctccttgaatttatccttaactgcttgcaaagtatctatgttgcattgatatagcaaacctcgtaactgtttaagctcatcaagtgttggattagtagagtgattttttagcttatcgttcattcttgcaatagtaaaaaactctttgtagattttttctctttctggatcttcttctttcttcgcagaagaagatttattaactgttctattagatgatctattaatactgctatatttatgtgacgctggtgacactaggggcatgtcatcaatgtcattaccctcatgacactcagttctccaccctagtgacatatgtgtcatgagggctgatccagcatgaatttttcttcctaagactgcaccatttttatcactaacaactttttcacgctcaattaattttttcttttcaagcaagtctaaatatctattcacttggcgaatagatactcttaaatgctctgctatttttctgttactcatgaaaaactctccagtaacattaagcattgagataatctcacccattaaaagtattgatttaggtttttttagtaaatcctcatctcgtgaaattgatggtggaatcattaaaaaagctctaacacctttaaattcattttccattcagtttcctcttaaccattttaattagttatatgattcaattcatttagtattttactattttaaatagttaaaagcgctaaaaaaaatatcgtctttgctaactccaaaataatcagcaattttctgcatcataggcggtcttggagtagatctgcctgtttcccatgctgatactgtcacttgtgttgtacctaaagcttgtgcaagatccgattgactcatacctttttttactcttaaaatttttagtttagttaacatttgctacctccctttaactacatttatatattatactaatttaattagtaaatcaaggcaataaccaaatttcgactatttttattagtatttaactaattttattagtattagtagtaatataagtataaattattagttaaggagtctaggaaatgaaagattatgatagagcaatattagcaaataacatcaaaacactcagaaaacaaaaaaatttaaatcaagcagaattaggtaaaattttacatgtttctcaacaaaccattgggtcttgggaaacaggtagagcaattcctggatctgatacactaaacatattagctgactactttcaagtaagcactgatgaattactcggaagaaaaacatctgattctgtaaatgactcggacttaagcaaaatgattgaaaatgctagattctttgatggtaaacctattgatgatcatgataaagacctagttcgaggcatcttaaaaagaatttataatgagaaatagaaaaaggtgtgcattatggacactgaactaaaaaaattgctcaaagaatcaaacataagattggagtttgctcccttacattgcccaggactacttgtacatggaaaaaacagcaagcctgacgtaatgataattaattcaagctatgatgatgaacaagctaaaaatgtaatcttgcatgaactaggacatatgatatatgacaaagatgttcaaggagattaccaaactaatgattgtgctcatacttacagtgaacatggagcaaattcttttttaatacatgaaagagtcaaacaatatttcgctttgggtaacgattttcaaactgctaattggttagactttgctaaaagcatcggcacacaagactactttcaagtgcaagaagaactaaataaatataaatttaaagagtgaacatatgcttttaactatttcaaattatttaaaacgcccacctgctcaaacaagtaggtgggtgaatttatattaaaatacatataagtaatttatacgtaacatttaaatagcatataagtaatgtaagtgtatgaggtaatgaatatggcacattttgaaaaaagaggtactaagtggcgcgcacaagtatcttggtataaccctcaaggtaaacgtcaatttaaaactaaacaaggctttttaactaaatcagcagctagaaaatgggctaatgaaatggaagttgcaaaagacgataatcaaatatctaatcaagaccctatttttgctgaatatttcaagaattggtatgaaacttataaaacgcctggtacaaccaacggcacaaaaaaaagatacaagcgaatttacaaactcttaactgaatattttggcaaaaccaagctttcaaaggttaccaggtatcggtaccaagaatttatgaatcagtatggaaaaagtcatgttaaaggtacagtctacaaaacaaatggaagtatcaacagtagcattagagacgccttagctgaaggcttaataagaactaattttgcagaaaggatcaacttgacgtggaatgatgaacgtactagaaaaatcgattatctcaatttcaatcaggtacagcaacttaaaaagtcactcttagacggaattaaaccatcttatattagtagatacatgctcttaactatcatctacactggtatgcgtcctggtgaaatcagagttctaacgtggcacgacttaaactttgaagatcacactattcatatttctaaatcatgggattacgataataataaaatatttgactatgattcctgatatttatattatatatcgtttttacgatatttcaagacaaaaaagaatatacataatttttatattaagcacaatactaaaaacaatccacaataatactaataagatattcattttattcttcctaattatgaactgtgtatttttgcagttctctatttactttcttctgaagctccttttcctgatgctttttcagccattgttgattgataacgggcttcccatttttatcaattcgaggtgtgattcctccatcattttcaatcaagacatactcaacgcctgttttttcgtcaaccatgatcctttcaacaccttgatcaatttcttcaccagctttaccctccacttttaaatcaaatgctctaacaccaaaaacagaagtattattgaaaagaaaactataactaaaggtattaacacacatagcgccttcacatacttacgttcaaaagttaaacctggttgctttaaaatccaaaagcataccaacataaataaaactaagataggaattgctactatacaggtaattgctaacgattttgcttccgccatttctacttcactcttttcaaaaactcacttagcttacgtctacctagcactcttttaaactcatcactcattgcttggctaatataagctgcctgtttttctttaaaatctttttcagtaccaccttgagctaaatattcatgatacatagacattaaaatttgatcatcaatttcgagatccatttcattcattcctaaaattggtaactgctccgaaccatatggatgaagcctaattatcttagtcatgcttttaccttctttgtttccttgttctgctttattttccgcttaatccaagcaatccccatagataaacccttaattcctagaaaaatcacaccaattaccagcgcaattctccatacaccatccatcagtgttaacagagctggaaaaatcagatagattccgaaagcaagccaaaccaatttccagagatggaatgctgaagcaagaataaagacccaaaccataatccaaaaccaatctgtttgtgaaagtactaaaaacatagcgttctccttagcattaataaactcttattacctttgtctgaacttgaggaatattacctctagtattgataactacttgcaaatcggcttcaatttgccttgcttgcttagctttaaaaacttttatttgatttttaggtacgattgccttaatcactataggggtatcgtcctcaaaagaatgatgatcatttgataataattcaagcatcgaacatccttgattcatatcaacattcattactttaagcgagacagacttataattcacagtttgtttgtctcttttggtaactctattaacatacttttcttctgcgtctgtcttgttaaagactactgctatccaaatcaaactcgtaagaaagtaagccaaatatatgcttaaaaataatttcatagctagctcttttcaactactacgagccattttccttcaccaacatacttaatcttttgattagccttaatgctgataaaatgaccattaagctgcttaacgcgaacataaaagctattactatccaacggttgaattccaagcacctcacttctaaagcgccaagtaaaaactttagctaattctgcaggtgtagctagcattccaggatataaatcatatttattcatcatgaacccccgacatattcatataatctacaaaagctttctcaatcaatttacccatttttgctagatagtctgggttataaattctattgtttaatacttctggactgtttcccattaagcccaatgcttcccctgctaaatagctgtttaactctagcttccgcttactactaagtcgttgcccatctagttcaagatcatctgccatgctaagaaacgcaatggaaaacagtctatcttcaatttcttgaatatcaacttttccatcaagcaagtcttgtgcaacttttttatttttaggattcattcttacaacctcatatccgtctaattatctatttatcaatatcttacgatcttatacaaaagtatcgcaaaaatgatatattaataatgatttactacatagaatttaaatttttaaaggggcatattatgaaagataaacttaagcaatccatcatcgcaattactagtgccaatctcaaaagaattttgtacaatcaaaaactaactcaaagagacttagcagcactaacaggaatctcgatcccatcaattaatcgctattatttaggaaatggcgccataccacaaaataacttggtaaagatcgctaaagccttgcatgtttcacctaatgaacttgatccttcatatcagcccactaaagactttttatctcaactagctgaaaaaactgatgacccagatttaaaatttagaactgattatcttaaacagttaattcagaccagcaatttatctgttcaggaaattgccagtaggctcaatataaagcctattacagtctataagtggctggcaggggtaaatacccctagcaaggaaaatacagccaaattagccgatttatttagcgtcagcgttaattccttagcagatgcctctaaagaaattcgattaactcctcaacagagcaaaatattaaacgctctgccatcagatttaaccaatcagcaaacagatctaatcatttctctgatcaaatccgttttagaaaatgctaactagttttcgatagattcatacatgcttgaaattccactaattagtgctagctggcagttaattctccattgccaccagttaagtatgtattcgacttgatcatttgaatctagcatggttactgagctagttgatacttgcaaatctgaatcttctaggattgttttaatttgaattgcaagattatctgacgttgttttggtttcttgcttaactttaaggtgattatcgcttaaaatgtcgcttaataaacgtgaggactctttcaaattcagcatccaattagaaggcaacaagtcgtcaatagcgtaacctaactcatctactttgaatataaacttttcaaaattttcttttttacctgttaattccatttatttctcccaactgattaaatctatagctctttgtggagcgttatttgtttacatgtttttgcattttatcttagctggtaatttttgcattccagtcaatctcgtgttgatgtttttgcatccactcacaagcttctttagcaaaaataattgtagttttaccagctggcgtttttctggggtttactacgaatccaccatttttataatcaacttctggaaattcatcgaaaataaaagttcttacccagttatcacctttgccacgacaacagtattttctaaactcatcgatattccaagtcttgccagttaagtcttgcttatctgcactaacagattcttttacaatacttttaattagattcgtaaggcttggaaggttgattaatgtgtcagacatatcttcttgcattgctatccccagctttcataatttctatcatttgctaagccatctctcagcatctttaacaaatagctatatggtttacctaccatgtcccatgtcattctctccttgaatttatccttaactgcttgcaaagtatctatgttgcattgatatagcaaacctcgtaactgtttaagctcatcaagtgttggattagtagagtgattttttagcttatcgttcattcttgcaatagtaaaaaactctttgtagattttttctctttctggatcttcttctttcttcacagaagaagatttattaactgttctattagatgatctattaatactgctctttttatgtaaagtgggctttactaccctactaaagcttgctttactaccctcatcaagtgggcttgtccaccctagtaaacttatccttactaggttaggaccagcttttatggttctacctaatattatttttgatttttcacttttagggtttttagctggaactgttatttgctctctcactatcaatcctttatcttcaagcagattcagccagtcattaacagattgaacagaagcatcaagaataccagcaagtgttcgattactcatatgaaaatcacctgtgacattcaacattgaaatgatctcacccatcaaaaggatggatttaggcttttttagcagttccttatctctcgaaatcgatggtgggatcattataaacgccttagaaccttcaaattccttatccactttaaaatacctgctttccaaattattttatgtgctcttttaacactctttaaacgaaaattttttctagtggtatttctaatttctttgaaagtgctggaagttctacagcctgaaacttatatgttccatgttctcttcgaaaatacttgtctggactggctaatccaagactattagccatatcttcatttgaaaaccctaactcaagtcttttctctcgaattagatccaaattaattcttcttttcaaaatattttctcctttcgtatcttgcgattttcgcaactagtttacatgtattatattacattgccattttcgcaatgtcaatatttttatttgctatttttgcactttttaagcaacatagtgcgatttatgttatattgattgcgaaaagcgcaatagaaagtgtgaaaaaatgaacgatcaagaactacttgctagaaaaatagttagtatacgtaattctcaagatatgagtcagctagaactagcccaaaaagctaatatcgaaagaactgctttaaacaaaattgaaaaaggaactagaaaaatttctagtgatgaattgaaacgcatagcattagctttacaccaatcatctgatgacttattaaatattaataatcatgtaaagactaccaacacagtaactgaatcttctgaatatgatttaaatagaatgattgataatgccagatttttcgatggaaaacctattgatgatcatgacaaagacttagttcgaggcatcctaaaaagaatttataatgagaaatagaaaaaggtgtgcattatggacactgaactaaaaaagttgctcaaagaatcaaacataagattggagtttgcggacttacattgtccaggactacttgtacatggaaaaaacagcaagcctgacgtaatgataattaattcaagctatgatgatgaacaagctaaaaatgtaatcttgcatgaactaggacatatgatatatgacaaagatgttcaaggagattaccaaactgatgattgtgctcatacttgcagtgaacatggagcaaattcttttttaatacgtgagagagtcaaacaatatattgccttaggcaatgatcttcaaactactaactggttagactttgctaaaagcatcggcacacaagattactttcaagtgcaagaagaactaaataaatacgcgtggtgctagttaaatcgttctagacaataagccaaattataagctaaaattgcaatttccaaccggctttgaaagcctatcagactacgtgctcgattgttctcggcattgtaataggtcagaagcgaaaagtcgctttcaattgttctgcgaatagccatcaattgatgatcattgtgctttttagctcctgtcatatttttacgatatggtgtccaaagttcgtaacccatttgttttagctgttgatgcagttctttgcctaaatagccttcgtcgccaagaagatagtaattagatggatgggtattttctatcagttcaactgtctccctggcatcatgaactgatgcttttgttacgacataatcaagaatgtaaccgtcatcgctaacaatgacatgaactttgaaaccatagaagtaaattttcttggtggccttataaccaatgttggcataaccgcgaaaaattttagcacgatagttgcgaattggttggcaaacaggtaccggaaagctgtcaatgatcaagaactgtccattcaggtcaacctttttattcatttcttgccgtatctgataaatcaattgcaatagctgacgtgaacgtcgattaaaacgtgagtgtgataaacaattgaaacattcacagaatcttctttgtgattcaattcctgtcttagcttgccagataagtaaagccaaaatcagactgtccgtagttttaatttgatcaatatttcgccgatgagtaaactcagccggtgcatacaaacgataccagtgccgacaaattatcactaaatctttaaaactaacttgtaaatggtggctaaaacgcttaagcttaaggcagttcaatcagatcagactcttttctattattactatttacaagtcgagtctaacaagattggacttttttattaactaaaacgatttaactagcaccacgcgtaaataaatataaatttgaagaatgaacatatgcttataactatttcaatatattaaaaatgcccgcctgctcaaacaagtaggcgggtgaatttatattgagtacatataagtaatttatatgtaacatttaaatagcatataagtaacgtaagtatatgaggcaatgaatatggcacattttgaaaaaagaggtactaaatggcgcgcacaagtatcttggtataactctcaaggtaaacgtcaatttaaaactaaacagggctttttaactaaatcagcagctagaaaatgggctaatgaaatggaagtcgctaaagacgacaatcaaatatccaaccaagaccctatttttgctgaatatttcaagaattggtatgaaacttataaaacgcctggtacaaccaacggcacaaaaaaaagatacaagcgaatttacaaactcttaactgaatattttggtaaaaccaagctttcaaaggttaccaggtatcggtaccaagaatttatgaatcagtatggaaaaagccatgttaaaggtacagtctacaaaacaaatggaagtatcaacagtagcattagagacgccttagctgaaggcttaataagaactaattttgcagaaaggatcaacttgacgtggaatgatgaacgtactagaaaaatcgattatctcaatttcaatcaggtacagcaacttaaaaagtcactcttaggcggaattaaaccatcatatattagtagatacatgctcttaactatcatctacactggtatgcgtcctggtgaaatcagagttctaacgtggcacgacttaaactttgaagatcacactattcatatttctaaatcatgggattacgataataataaaatatttgactatgattctgatgaaattaataaagaaaccaaaaatcgctcttctactcgtgttattaaagtagatcagcatttactagatattctcactcagttaagaccaaacaatcatgaacgacttttcattgaccctgatggaaaaattccaacttcaagtgctgtaaacaaggttttgcgaaaacagttaaaaaagcttaatatcaataaaaagaactttcattttcacagtctaaggcacactcacgtagctatgttgctattcaaaggtgttaacttatattcaataagtaaacgcctagggcactccaatatgagtatcacggctaatacttatgcttacatgttagatgaattaaaacaaaaatccgataaacaaatagtaaatattctggacgagatttaaaataatttcgtccttttttcatgatcagataccttttggatacctttgcaaaacaaaaaccgctctagaacaacatctagaacggttatctatggagatgaggggaattgaacccctgtccaaacgcatctcgtcactgacctctacgatcatagttatattacttgaacttcactagctcaaaacgccatataacagggctagaatgggctagctaacctgttaagactctttttaactattcaggtgaggtagttaaacgtaactcgctaaagttgatactcggtgtcagccacgagtaaaccgacaaggagcaacacatgcgcttaaattaagcagctaatgcgtaagaatttttgttatttgcagttatatttaactgtaacgtttttacgtagtcgtaacctacgaaccgcagtcaatgcgggtctacgcctgtcgaatcccaaaacatccccttgagatacttattcattatagcatagacacacattacatgcgataaaaatgcttaatcaatattagtcaaacgtaccacatcacgttcaatcatcaattcttcattagttgggataaccattcctgcaactttggaatctgtttttgtgattagtccttcactaacactttcattagcttcattatctacaacaacacccatatatgcgaaagcgtcaagaaccgcttttctcacaccagtatcatgttcaccaataccagcagtaaagataattgcatcaacgccgcccatttcggcaatataagcaccaacgtagcgaataatacgattaatgaaaatttttcttgctaacttagcccgttcgctatcactttcacgcacatcgcgcatatctggtgaaattcctgacaagcccaacaaaccagacttattattcatgatataaatcatttcatccatcgacttatgctctaccttcattagatgttgcacgagtgaaggatcgatatcaccggttctagtagccattgtaattccggcaattggactaaagcccattgaggtatcgtaagacttgccatccttaactgcagtaattgatgcgcctgatcccaagtgacagatgactaactttaagtcttttaaatctttacctagtaatttagcagcacgcggtgctgtatagcgaattgaagtaccatgagcaccatatttacgtacaccatatttttcataatattcataaggaagtgaatacaaataatgtactggatcaagattacggtgataagtagtatcaaaaaccgcaacttctggcacatttggtaaaacattcataaaagcttcaattccgcgagcctcagcaggattgtgaagcggagcataatctgacaattcgtagatcttaggcagattttccttagtaataatagtagaatccttaaagtactctccaccattaacaacacgatgtcctacaccgacaatttcagttagttcttcaacaacatggtatccttttaaaaacttgatcaataagctaactgcagcttcttgatctgggatttcagttttttcaacgtgcttagtaccatcagctaacttaatctcaaatgatgaatcttcaagacctacacgatcagccattcctttggcaagaaccttttcatctggtaatgagaataatttgtacttaaaagatgaactaccagagttaattgccaaaacttttttcataaaaattaattcctcttctttcaaaaaaataagtgctttatcaattaatgattaatctttgcataccactcgttaagtttaacattaaattgaattaaagtctcttcttttttcaaggaaccaagtttggtaagcaaaacttcacttgctttggcctcatcaccgtgattttggaaaactaaaactgactttggattaaacttgttcttaaacatatcatctggcaactctacaatcgccttcaaatagactttcttagttaaccatggcataaaatcagcgccaatcttgcctgacaaaatagacttaggaactaccaaaaaggcatagccgttaggctttaaattattaataatttgttcgattaacaacaaatgagcaaaagaatgacctttcttagcctgattttcaaaattcttggcattctcatcaactggataatagcctacaggtaaatcacttacaattgcatcagcgttaggacacatccaaggcattaaagcgtcttgatgatataactcaatgtcaatattattcagatgcgcagccacatctgtcaaacttaacatatcttcatcgttatcaatccctaccaattgataattatccttagaatgattgagtgccttaagttgagaaataattgaaaacaacaaattccctgtacccacggcaggatcaacgatttccatcttttgatcttttaataatttatgcatcaacattgctactactgtagcaattgcaggtggagtaggcatttggttaacatcaaagccatcatcattaactgcctttaaagttagaaaagtaaagacttgagccttttctttttggctaatttcgtcataatctattgcttgatacttttgacttaattcagccactgttttttcatccggtgcaccattttcaaccttaatcttgccactttctaagttatcaaaagtctctactaaggcttctgtaaatgaaacatttaatgccgtttgcaaagtttgcacacagtctaaaaactgattaaaaagtttttccaaattttccatagcggtccctccataccttaattattttatagaaagggataaagaggtgcaaggaaagtcaatcatccgttaagcattcgataattaggcgattgttctccatgctagcatgataaatatcttgatacattttgataaacaaaagcgtggtcattaaaactaatacactacttagtaaggcactgccttttacgttatgcgtctttttctttggttttagcatttttcttttcctgttcctcatcaagctgaaaaactaaatctgatgcacccttatttttctctgttaccctaataatgatgctatctttagtggttttaaaagcagccttttcaacgttaaataataacggcatatagcctttccctgcaccagatactttaagtacgttctttttatagtattcaattcggtaagtagttgcatcgcctttttgatcgatgcacttaaaggaagcactattacttatagctaatttagttactggatacactgccttaattttgtcagcccgcataaaattttctagctgtacataagcataggctacttcattgacatgctgattttgattcaagtttgcttttttaacactcaacaataaattttgtaaaattagcagcaccatcatagtaataaaaagcgaaaacattgcttcagctaacataaaacctttactctttgaccgcaaaagtttgtttagtcgttgcatcccaaacatgattacgtcctgccttttgataaattcgatcgtgaactgttacttgctccaggtcagttttagtcagtatatggtaagcataagcacgatctgtttttaattccatctcacgaccatttttctgattttcagctacagttatataaaagcaactaacagcaatcacagcaattataattgctataaagctctcaattactagaaatcctttaacttttatcattccgctactctcccccacagcatttgatatttcaggcttttttccattccgtagccactaaaagtcaccgtacctggtttagaataaccagtcaggttgaatttaaaatgatccaagccagtaattttgatattttgatcaactggaatacttttgtgatattttccgccagagaataaaatttgattggatttagctagatatgatacgcaaatagtaacctccttgatcgtactgtacctcgaagtttgatcaagtgccgtcgtaactcttttaacagtattatcaaaaatcagtttttcttgatatctttttaactgcaaactaccaatcaacaaaatgccacagcaaacaccaagtgtaattattacttctagtagggaaaagccggctaatttatttcttttcaacgacttcgccactatctaacgtgaaattctttttagctttagtaatttgatcaccagttaagtaatcgtccttttttagatcttcaaaatctttaggttcaccatatttatccttatataactcaacttgcgtttgcacagtagtcctaaatgcatccgcagttttagtttcagcattcttcttttgattaatcaaattaggcacaattagcaaaatcaaaatcacgataatggcaattaccacaaccatttcaatcaaagtaaaaccctcttgcttgcggcgcttagccataatgtttgctaaatacttcttcatcttctctttcatttttaacttaatcctcttcttcactctatttttttacttttatctttaatgtcactttttctatagtccttgcatcattgaatacattggtaataacagcttcaaatacattccaataatgcataagccaattaaaataaaacaagctggttgaacattgacgactaatttctcaattttttcagttaaatccaaaaataggctacgtcctaataacaaacagcgcttactcaagctctttcgctcagagccagtctgcaataaaactaataaactattaggcaaaaaatcctctgcattaataatttcttctaaattttttccttcagctaaatcgtgccctatcttttgtcccagtgcttgctgcaatgaacctttctcttgatctgccgcatattcgcacattcgctgcaatgaaaagccactagctagcagcagtccaatgtcataaaccaacaaataatgaatatacagcataactacctgcccaattaacggatatttactcagttttttcattgatgaataatcctgtttattgagcaaagtaacgatcttagcaaaaaaatataagcccagcaatacaataatgatcagaccaatcatgaccatatctcctgaatgatcactgctatcgctgaattgtgtcgaaataaacgattgcataaagaccagtaaaatcaccatcattatcgctaaaaccaacggataagataattcagcccgcagttttttcatctgctcctgttttagtcgattcaacgttgctaaatgctgcaaacattcaactaggtttccttgctgtaaagccaaattaacctgagttactgtcgttttagaaaagcctagtttaagcagttcagtactaaaacttgctccttctttcatgcgactagccattctttccatcaactgacacctttttggccacaatgccggcattaattcaattgaattgagcaaagaaaaaccattatctaaactatgttttaaataatccaaaaaggccaattgttcttcgccatttaacttatcctttttggaattgccaatatacttcatgattaatttctcctcctttccacaaacgctctagattttcctgccaattaacgaattcaccacgaaccgatttgcctagctctttttttagcaaagaatctgctgcaatatccatcaagcactttaattttccttgactgactaataatcgctgatacgacactgcagttagacaatttgtcagttcgtcacacctaatacctaatccctctagtcgagaaatagtttgcaaagtacttttagcatgaactgtcgcaaaaaccaggtgtccacttaaagctgcatcaactgctaaacgtgctgttccttgatcacgaatttctccaataattaaaatatctggacgatgccgtaatgccgcctttaacaggttttggtaatcaattcccgcttcgttattgacttgtgcttgcaaaaaagaagactcatgaatttcaacaggatcctcgattgtcatcactactttgttttggctcattttcttagcaatttcatacattgtcgttgtcttgcccgagccagttggaccactagtaataatcaatccgcgactcttagccagcttttcaattgttcccagctgctctggaataaaatattgactatggtcaatcccatagatgactcgaataaccagtgactcttgatcggaaaaatctcctaagctagataaacgcaagaaatattcatgtccttcattctcatatgtcattgcgccaacctgcgggcgacgatgttctgcaatatccatctgagcactgtacttaaaaaaattgataatttcctttcccgtctccaaagtaaaacctgcatattcaattagacccttaccggtccgaaatttaaccatcaagttttcttttttcgggaaaaagaaaatatcacttgctttaactttaattgcctcaatcaataattcactgacaatttctttgatcttcataaaaatcctccttttttgcctcacattatttattacgcaaaaaaaatcgatttttttgtgagaaatttaaaaaaacacaaaaaattttctcaactctaaaaaacgttgatctaacagcatttcaagattaaaaaaccattaaaaaagtacacaaaaaaaatagcttagccattggctaagctatttcatcattaactaattaatcttcatcagccgctgcagtataaacattttgaacatcgtcactatcttcaagagcatcaactaaatgttcaaattgttccttcttatctgctggaactggagtggtgttttgtggaatcatagttaattcagcatctgctagtttgtaaccatccttaattaaggcgtcacgtacacctgcaaattgctttggatcagtgtagatttcgtatgcatcatcactagtttgaagatcgtcaccaccagcatccataacatcaagtaatacttgatcttcatcagcatcagtagttgaacgatcaattacaatgtagcctttacggtcaaacatgtaagcaactgaaccagtagcaccaagtgaaccaccgttacgagtgaaagcaacacgaacgtccgaagctgtacggttcttgttatcagtcaaagcttcaacaaagactgcaacaccacctggagcataaccttcgtaagtaatttcgtcgtagtgttcttctgaaccaccttcggccttcttgatggcacgcttgatgttatccttaggcatgttgtttgaacgtgccttatcaattaccatacgtaatgtaggattcccatcaggatcaggaccaccactctttgcagccatataaatttcacgagataacttttggaaaattttacctctctttgcgtcttgcgcattcttgcggccttgaatattgtgccattttgaatgtcctgacataaggatccttctttcttttttctaatattaattaacgatattatcttaactcacagcacctcaaaattcaatggtgtcaaccatttaaacttgttttttctggtcaaaaaatctgtgtttaataaacaatactagcattatcagcaaaattgccgttaatgctcctgctccatcaagcattacatcatgcacgctcggtgttctatcacctgttaaaaattgatgatattcatcaaatacagcaaatgcaattgccataaaccaagttaaaactggtgctacccatttgattttgaaaattcttcttaatcctaaatagccaaaaccacctagtaaaaaataagaaccaaagtgagccattttacgtaaaacaaattgggccagccctgctcgaccatcaacttgcacattgtgaatacgaccaccgtaagtaaaatcccagccagcaacgatattctctaaccagccaaaataacggttaattttattgtcatgaatttcctgctgttgataagtcattgaactagaaatgaacaatgcaactagcaccaataaagcaagcagtaaaaagattttttctcgtttagtaaaatgaaatttatccattgctatttcttctctcttttttacttcttactttaacaaaaaacgggttaaacttgacccgttttataaattatttaactttgcttaatgcttcatcaattggtgtgtccccatcatgcataataattacttgatgaatcgtattatcatactttaggctatcaaccaatacctgagcaacatcatcaatcgaattttctccaccttctggagtaaatgatgtcttacccgttgctggcttctccattaagttacctggttgaatgatcgtataatccaaattagtattatgaattaaccattcatcagaaaagtacttagcaatatcataatcaataatgcttgcaagagaaggaatttctgcccacttgtcttggtcaagcgcaaaggcggagcttagttgaacgtaacgcttaacgccattagcttcagcagccttcatcagcttaactgcgccatttaagtcagtttgcaataagtcctttccacgagaacctgctacaaaaatcactgcatctgggtgacctaattcttcggtcagcttattaagcgaatcatgaaaatccaaatgttgcacccgcatattaggagaaataatttcaacagtattttctcttcttgcacctgcaattacttcatagccttcatctatcaatcttttgattacttctttgctcactctgcctgtagcaccagctacaaaaactttcgttgtttttcctttctaccagctagccttcttaacacctggaagttgacccttatgagctaattcacgcatacattctcggcataagccaaacttccgataaactgaatgcggtcggccgcaacgttcacagcgcgtgtattgtctagttgaaaattttgtttcttttttgttacgaataatttgtgatgtttttgccataaatacctcttatctgcgtctatttattctttgaggcgctggctttcttttgctagttaatagtcccaacgccaaaataataattccaattgccaatacttgtccagtcattaacatccccacctttctttttgactcttactttttgttggtgtattatacatgcttacctataataagtaaagagatttgattgtaaatagaaagcgttttacactagtctgatacattccctgtcaagtagacagtagaattacataaagcttttattcctcagttgattaataatcagctgaggattttttggcttctcttattttcttttcgtgtattttttgccagtatttctcaattcgatgatttggtgcaatagggcaattcttaatattgcctttcatcgcttctttgcgcatttcaccagcagttaaaccgttaaaacgtttctgtggatcttcattaatgtagtaatctattgtcttacaaatagaatcattaagttcatcataactggccacttgaggatgaagaataactcgcatttctttgataatgccttgccagccttccattggaccattatcaatacagcagccaacacgagacattgattgcgtcatgccttggtcttctaattggttttggaaaggtgcgcgagtaaattgaaaaccacgatcactatggaaaagcggatgagcattagggtatgctttaacagcctgcttataggctgcttgaactaaagcagtatcgtttcgtttactaattgcgtagccaacaggatagcgatcatatagatcaaacacagtacatagatatgccttaggcaggttagcagcaacgacttcagtgatatctgtacaccatttttcattaggtctagatgcattaaagtctctttttaacttgttttcggccgttttctcaggcgttgtatgcttgaactttagcttctggtatctaggcttttgtgatctaatgccattgatacacatcaagcggtaaacagttttatgataaaccggcttttcatcagacatctgtcgattaactgccatggtcatcttttccgtcccaaacagactgttgttagacttggttatttcaatgatctttgcttcaatctttttgtctcgttcttcacgcttactcggcttgcgcttaggatcaaagtatttgtaataagctgagcgtgctattttagcccatttgcacattaaatcaatcttccaattgtacttttgatggcagtcatggattaactgatatgtttcttgtttccagcgtctttttattgcggcttgtctgtatcttggttgtccggcaagcacatcctttctaactgatctaatttttttaggaattcgttcttagtttgttcttctttgagctgacgctctaattccttaatttttcgattagccagttctaactcagttagctcttctggcttcttatgtctgcctcgtttatctgttaatcctgtttcaccattagctagatatttgtgtgtccagctgtaaacctgctggtaagaacaatcaaatttgacagctgtttgagtgtaattcttgtcgtgattaagacagtattgaacaatctgaattctttcttgctgggtagtttttcttcttgctttagtcatatagacctccggatggggatcatagtcccgattttctatatgactattatacttggaaacccattctgatactgttccattgcttctaatgccatatttattagctaaagaaggtaacgacattttgccagctaaatattcttgaacaaccttttctttaaatgccttagagtaatgattattgtattgagcattacttagaagggtatcacgattgctttgatattgatgaacccatcttcttacttgcatcgctccacttttacttggcatcttaagccgtttagctatttcaacgctgctcctattaccattcaagtattgttcaactgcccatatcttttgatcgaatgaatatttactttttctggacataaaaaatcccacctccatggataattgaatactttatgtatttaaatcgtccactttagtgggattgtatcagtcacagttctttttaataggtaaaatttatttgaatactttcatctaagaaaggaatagaatgaacgaaaaatgtaaaaataagtcgccaggattcttatctttttagggagtaattatttttaaatagagaaggatgagaattaattggacgatttaacatcaacaaataaaatgaaagccatcacttggcctgttttgaccttgatggcactttgtactgttatcggcttggacgatatcatgtacaacttccaaaaccaagggatgccagttatcacctcttggattatcatgtgtttgctttatgtaacaccttactcattaatggtaggacaattaggttctacgtttagtgaagaaggtggcggactttcatcatgggtccgcggtactgacggagaatttttaggttacttcactgcttggacatactgggcagcctcaattccttatgctgtagactccgctaacgaaatcattgtcgacctaggttgggcattgaccggttcaaagggattccaagataaaattcctactaccatgtttgctgctttgactttcgttgtgttcattgttttcattatcgttgaacaccactttgccaactcaatggaattcctttccagtattggtggtggtttgatggtcattatgactgtcttgtttgttttccttgcctttgttggtttggcaaaatcaggcggtcacatggctacccaaccatttacttggcacacaatcattcctaaattcgacttgcactactggtcaaccgtcggaatgttaatctatgccatgaatgggtgtgaactggttgcaccatatgtaactaagatgaagaaacctaagtcagacttccctaaggcaatgattactttagctatcatgactgctttcttaactatccttggttcatttgcacttggtatctactttgacgcataccacattccaaacgacttgaagatgaacggtgcttactacgtattcgacatggttggtaaacaattcggtatgggtaaattcttgctttacctctgggcttggacatcattattgttcaactgtgccttggttgccgtattgcttgatgccatgactagaatgcttatctccgacactggcgataagtacatgcctaagttcttacgtaagaaggacaaaaacggcttaccaattaacggttacatcttaactgttgccctttcatcattcatcatgatcttaggtatcttcttacctgacatgaacgatatcttcaactggttgcttaacttgaactcaatcatttcaccaggtgttacctgctggatcttctactcattcatgagagtaagaaagaactcaaagaagtacccatcaaaatatgtctacattaaaaacgataaacttgcttggcttgttggtcttgccttgttagttgttactgccgtagcaaccatccttggttttgcaccacaagatgttaagcaaggcagtggcctttggtggtacgaattgatcattaatattgtagccgtaattgtcttaattggtttgggtgcaattttacctggaattagacgtcgtgaagaagaatacggtattgcttttgacaaatctcaatggatttggatgggaattatcattatcggttctattattcttgacgtatggcttggtagtaccaagattccagcaagaatcacaatgattatagttgaagctatcgctgcattaatcattacttggattgttggacgaagaaaaccccaacaagcaaccatataaaaactaaattacaaaaaagctcgcaaataatgtcattaattatggcatgctttacgagcttcttttttgctcaaattgatatcactttcactctatattctataatcatatagtaatttacaattattttgtaattttatatactcaacaaggttagcactaagtgttatactaaagtataatggagataaggtatatatttatagaattatttaaactgagactgaataaaatgaaaaatataagaaagaagattatagtatttctgctagccttggaatgcttagctttttgtatatcctttaatagcaaagtgtatgcatcatggagtcccgcttcagaatggaaagaaaatggctatcctactgaggactggacaacagatcaatttacataccatcaaataggatttattaatgatcctaaaaataatcaattgttgttatatgtagacatttgccctgattctaaaaccaatagaaatagtcatggatatgaaggtggatatcgtcaattgcagccatcagcctacaatataaatgttggtaatgctacatacagtgttaatttagatgtcaatccatggaatattcaaaatggaaaatctggatatgcaggaattggagtatgggatcctcaaactaatcaatataaagcaactaaagataatctctgtcattattatgcagatagtgatggccgccaatcggccataattaagattccttacaatatgtttaacagagatgacctaaacggatcaactaaaatgacaatgcaaaatcctaatttgggtggcaacacaaaaatcacaatcagcggagccagcaccggcccatacatccctgccatcatcgcttttgtcttagcttcaatagccgcaattagttattaccataaaagaaagttagtacgtcatgaacatcagtaaaatatccccaaaaatatttcattttggaaatggtgtcatccgtgcctttttctttggcttgattataattagcttcttcgctgtgctctcatctactaattggctgccagatgcaaaaactacgaccggcttaacttacataatgtttgcactactattaattttagttttaagctggttctcctttccaaagtttcaaatgttcttaaaaacaatttttatcaagcataaatggattacttctattatttgtttagtccttgcattaatttggcaaattcaatttgtctacttcgtacatcccgcaatcggatttgatgttagtgctgttcacaataccataatcaatccgaatctacctgaattaagaggatatttcagtgttaactacaacaacctatccatcctccttactctaagacaagttgccaatatctttcattcaaccagttggttaacaatggctttatgttcaacacttgttacagatttaagtgttttagtaatcatcgctacaattgcgataatcaattttcaaaaaattcccaatatcatttatattctagctagtctgcttagcatattccctatttgcatggttccttacacagatgtatggtgcttgctccctatttcactttcaatttttggctggagcatcgctacccaaaaatcatatctagttgtcattcgttttttaggagcaattttatccggaattagcttagcatgtggcgtttggatcaagccttcagttgctgtttggggtattgccgcgattttaacgagtttactctatattttaaaaaacaacaaagtaattctaacttctattttctgtttaactattgcagcaagttttgttttagcctatcaacctcttaaaaaagcggttcaagatcagcattacatcatcgttaatcaaaaacgccaaattccgatgatccacttcatcaacgttggtttaacacatgatggtgcctatgatccaaaagcagctttaaaaatggatgagcttcctactaagaaacaaaaagttgtctattctaaaaagatgatcatcaagcgtcttaaaaaacgcggtccattgggttatttacaatttctagttaaaaagcaaggtctaaatactgcagatggtacattcggctggctgcatgaaggccattttattatttccaagcagccatcagaaggctggcgaggattcttagcggaatttatctatccaaatggaaaatatgttattgagtttagatttatcgctcaaattctttggacaattattatttttgtattgctattcagttttcaaaaaggcggctttattattcaaacgctaagaatggcactagttggcggttttatattcttacttctttttgaaggcggacgtagtcgttatctagttcaattcttacctattatcttgattttaacagcactttcagcagacactgctaaatataatttagataaaattttgacagcaattctaccgaaaagaggtttttaaatatgaatcttagtttaatttaccctactatctctttaccaatcattacaattagcatggttgtaactcaaacacaaatagaaaaagtatgggagaaacagctagaagactggcgtcaccatttatttatcatattgtgttttactactttttacatactccaaactgtttgtattgcaaatgtaaccatctttacctttaaagcaattgcttatatgtatgtcattccaacaattatggtattacgcaacaagcaacatatttggtggtttttgctttttatcacaccactaattccgttacttattggtcttgatttaaagagatattcatttataaatatccccgctactttattgcagatttcatccatcgcattaatctgctttattctaaatcattgtcaaaatctttcatatcaagttaagtatatcattgccctttattcagggagtctcatccattttgtacgtctttatatagaaaatgaattacacctcacatttttaatcgctttgacaatcggaactactttcaccatcattggtgaaagctggcgttattattttgaaagtcgacatgaagaagcaattgctaaattgcattacgaaagcaagcgtgatgaattaactggtcttcttaactttcgcgcttttgaccaagaaatgaaaaatttatctaaaagacctaatataactaatacctatattggcgctattgatatcgatcattttaaagtaatcaatgatacctatggtcacttaaatggtaatattgttctgcatactttttctaaaaaactgaaacacgagattgataaagcttttgctcctaattgtttcgtttaccgctttggcggtgacgaattttcaattgtcatttttaatgctaatcctgaacaaatcatcgctgcactaaacaatgttgaacaatatttccgcgataattttatcaaacttcctgataataaaactaaaataaagttctcgttttcatgtggcttcacgaagcatttatctaatgaacatttttataacactcttgaacgcgcagatgatttagtttacaaagtaaaaaataatggccgcggaaaaatattgactgattaaaaaactaaggaaatgaataatgcttaatggatatttaattggcgggattatagtttggttatatgccctttcagtaactaatcgtgcacatttatttgctttttattattgggttggtgctattggtgcttttcttttaactacttttgcatgccacaaatattttgtctggttcctagctagcctagtgagccgcggagctggtgtgattggacagctgactcatagctttactgcttatccgtttccagctgctttagacattcaaactacttttggatcaattaccctattagttgactatgaatgttctggaattattgaaacattggcatatttaagcttattaattttctttcctatttacactcgtcgtcaaaaggttgctcttagcattatcggtgttttttggatctactttattaatatttgccgattaggtttaattgggataaccgttcattaccttaatttgcgaaccctgttctgggttcacgacgttataggacgtatctttttctatatctttacaattcttctatattatcaagtcttcactcattcacaattagtctcaaacttactagggcgaagcaaattagattaaaaaggaataatcatgtttgatcaaacagtattacaaatgggattctgggctacttggcttttaattcctgtcatatttgaagaaattccgatgataattaattttattcggcttcttcatcatcataaaattcgcaaaaaaacccctctgccagattttttgccagtattatcaattattattccgacttataattcatccaaaacactttatagatgccttaaatcgctagctgattcagattatcccaaaaatttactaggaattttcgttgtcgataatggcagcaaagatgacacctttcaagtctttgctaaagctcaaacggactatccacaattattgatgcggtggcttacttctcctcatggaaagtcttctgcattaaatgctgccatttataaagcaagatcccaatatatcattaatatcgatagtgacggtcggttggataaacatgctttaaacaacattgttaaaaaattctcggctaatccaaatatcgatgctttaactggaacaattttaaatgaatattttgaatattgccaaacctttctagcaggaagaaatattgaaaataacagcaatcatattttcacgctttctggtgccttttcggcttttaaacgcgagaccttaattagaacgtatctttacagtaccgatacaattagtgaagatactgacatgactttccaaatccggtacaatttaaagggaacgatttcattttgtgatgatgcaattttttattctgaaccaattagcggcttcagtgaactatatactcagcgacaacgctggcaacgcggtgaactagaagtcattaacaaatatttatcgcaagttttatcttggaaacaattcttcagtaattttcaaattcgtcgtttaatcattgatcacacagtcactttcctaaaaataatttggatgtttgctatttttatattattaggatttggctattcatggatatcattattgttttcttatgcggtaatttatcttttatatttatttttggagatttcgagttcaatttgtgtttacatatacttaggaagctttccagaagaaagaaaattttatcttaaaaatatttggatgatttttttactgcttttttataatttactttgttctttcattcgttgtgttgggattattaatgcttcaaccaccactacaacttggcaaggaattaatataattcaagaaggtcaacaggttaaccaaatcataaaaaaagatataagacaattattgaaaagaaaaaattatgacgactaaatatcatacttatatattcacaacttatttgaacgcatcacatgctattcgttggagtaaaggaatcgggcaggctcattcccatacttatgaaataaggtatagctttcatattaataacggcaaattgattcgtttcaatgaaattgaaaataagattgctgaaattataaaaaagtttaataatcaatttttaaatgaagttgagccattcaccaaagtaaatcctactttagaaaatttaaccgattatctattcaatcgtttcggcgaagaattaaataaattgaattgtagtttagatgaaatatctgtaagtgaatcaccaatgagaacttatcagatttcaattaggtaacagaggtaatagtaatgagtaagtggtataacgtttttcaacctatttatcaagtcgataaagatttaaatgtaacaatttcacattatgaaatgttattacgagatgaaaatgattccttcccaaataacgatttcttcagagtaattggaactgaagaagaaaatcaaaaatggattttagccgaaaaagagtcaatagatcaagcttttgctaagtaccctgatatctgtatcaatttaaacattgagcctattcaattcgcatacccaagcgtttggaaatttattgaaaatatttatagtaagtatggtaaaaaagtggtcattgaagtaactgaacgtcaacttcaagctggaaccttaggtaataaacaatttgataaatctttccaaagattccatgatattggcttggacgttgttttagacgatgttgattctggtggtcatagctttacttttgtagatcaccattctgatataatcagtgggatcaaattatcattactagacttcgatcctattagttctgatactactattaaatttattgatgcttgggctagctttgctaaggaaaaacacttagatctagttgtagaagctatcagaaataaggaaattgctcaaaaatttgctggtaataaacatattttccagcaaggttattactggcaacagggagtaaaactagaagacttaccaacggtttatggatttaagaagtaattacaaaaagacagaattgattgcttaattctgtctttttttacatgtatttatttaaaaatttgtttattcgcattttatattcatgcggataagtttcgaatgaacgcgcatgagctgcacttttggcaatccataactccttaggaccatttgtagcatgatagttttgatacaccattttagttggcacaaaattatcttttccaccatggataaatagcattggcttagtattcttttttaattgcttaactgcagatgcatcccctaaataaaagccaagatttgctttacttacaccgcttaatagcgtaactgcacttgtagctactgcttgcggcataccgtataaatcttttgcttcatgcatgaattcagctttcacatcactatacccacagtcttcaatatatgccttaacttgcttaggcatcttgaggccactagtcatcattgttgttgctccgcccatactgacgccaaaaattacaatctgttgttttcttccttcaattgataaatctttattgacccattttctaacgtcatatttttcaggccaaccatagccaatatacttcccttgactttgtccatgagcacgcgcatcaggaatcaaaacattatatcccaattgatgaaacatcgccgcatagggtgccatggtatttttattattaccaaatccatgcagcaacacagcagtcttttcagaatgcttatttggaatataatttgcatctaagcggtagtttgaagaagcagacttaatataccaatgctcttttttagcgtttttataccactttttattctgcgcaagtgaatctttctttttcttgctagaatatttattcagcactgtcttttcacctggaacaaaagcaacattaaagaaatatgcttcaactgctccaattaaaacgattaaaactgtggcgactatccctattatccaccatacttttttgcgttttctattcaaaatgtcaactcctatataaaataatatagaattaattatacacttttgaattttatatggtatattgacattttaagtaaaatattgcctatacaaaaaatgatggcttacgccatcattttttgttattaatctaaatcttcaccgtgagattcaattaccttcttgtaccagtaaaatgaatccttaggcattctcttaagagtacctttaccttcatcatcacgatcaacatagataaaaccgtaacgcttagacatttgaccggtaccagctgatacttcatcaatacagccccaagtagtgtaggcacggacatcaacgccatcttcgatcgcacgattcattgccttaatgtgcattctaaggtaatcaatgcggtaatcgtcatgaatcttaccatcatcactaatcttatcaacggcacctagaccattttcaactaccatcattgggatttcgtaacggtcatacataacttcaaggtagtattgcaagccatctggatcagttgcccaaccccattctgaatacttaaggtatggattcttagcaccagcggcgaagttaccgccaaccttatcttttacttcatgagttgtgataacgttgctcatgtagtaagaaaaggtgtacatatcaactttaccttccaacatatccttcttatcttgctcagtaatgtctaagtgaacattgtgttctttccaaagacgcttagcaaatgttggatacttacccttgcattgtgcatccccacagtagaaaatattttgttcccacatatggcggttagtcaaaatatcctttggatctggggttaatgggtaatcaacgattccacaaatcatattccctaccacataatcaggatcaatttcatgagccaacttaactgcccgagcactagctacgaattgatagtgcaatttctgatatgcatgttggtatgccttatcatcagtcacattattgccaaaagcactaagcatcaacagggttgaattgatttcgttaaaagtaagccagtacttaactaatcccttgtattcttcaaacaaagtcttagcatatttcacatacatatcgatcattttacgatcttgccagtcatgatatttttcactgaggtaaagtggatcttcatagtgagaaatagtaactaaaggttcaatatcatattttttacattcttcaaatactctgcgataaaagtcaagtccagcttgatttggcttttcctcatcacccttagggaagatccgagtccaagcaattgataaacggaaggttttgaaacccatgtccgcaaacatcttaatatcatctttgtaatggtgataaaaatcaatcgctacatggttaggataatattcattaggatcaattgcaccaactgccccttcaggaagtcccgcacctggaactcctggtgttttttctaacttaccatttaacttgtaagtcaacattctaggtgcatctaagctacctgcagtagtaatatctgttactgataggcctttaccatcttcatcatatgcaccttcgatttggttagcggcagttgctccgccccataaaaagttctttggaaatgacattatgattctccttttctgaaagcatttacattaattatagactaattggtttgaacttgaccagttgttttaacttctgcgttactgccttgcaaagacaaaatttcttgaccaactttaacttcaccttgagctacttgctgtacagattcatatttcttagaattcgtaacaacaactggagtagtcacttcatagccagcagccttaatttctttaatattaaatttaaccaatggatcacctgctttaacctcttgacctttttctactaaagtcttgaagcccttaccttgcagattaacggtatccattccaatgtgcattaacacttctgcgccatctgtagtgttaagtccgacagcgtgtcctgttgggaaaactaaagcaatcttaccatcagctggggcatgaagcacaccttcgcttggttcaatagcaacgccttcccccattgcaccgcttgagaatacttcatctttaatttctgacaatggttttacttcaccgtctaatggtgaaactaatttggttgaaggattttccttttcttcacttaaaattgcttgtacaggagcactcttagtaatattagctgcttcattagcggcgtcagcaactttttgtgcttgttttttattatattcagcatcaactgattttttaccaaagagcatttgaagtgcaaaaccagctataaatgctacaataccggcaataattacgccgacaattgttgtcattgatcctcccttaggattaatgtaggccggaattgcaaagaatcccattgatggcataatgtacaatactgaatgaaaggcaccaatgattgcacctgagactgcaccagcaatacagcttaaaacaaatggcgtttttcttggtaatgtaataccataaattgctggttcagtaacaccgaacagtcctgagaaaaatgcaccagtagctgtttctttaagttttttgtccttagtttgacggataatagctaaaacaacaccaatttgcgcataacaaaccatgcaggataaacctagaattgggtcataacctaatgcggctaaatctgcagtagttacggcaacgattccccagtgaacaccgaaaataacaagtacttgccaaagagcacccattaataaaccagcaataattggactaaagttgtaaacacctgacatcactgcaccaattgcgtccccaacccaagtcattacaggaccaattactataaatgcaactggtaaagcaataatcatagtgacaactggaaccaagaacatttgcacaactgatggaatccactttttagcccagtgctcaataattgaagcaaaccaaacggtaaataatactggtaaaactgtagaagtataattcatcgtgataaccggaatgccaaagaaagtcgtgtgaatctctgaggcaaaagccgttcctttaaacaatgtacctagaacagtcttacttgcagctaattgaaccatagttggataagttaaggttgcaccaattgctaatccgataaattgattcatgtgaaatctacgtgctgcagttacccctaagaatactggtaagaagtagaaaatactatcaccaattgcatatagaatttggtaagtacccgatttagtagaaagccatcccattgcgcctactaaaactactaggcctttaataataccgccagcactaagtggagctagaatatctgtaaaaatgcctgaaatcaaagcaacggctttatccacaaagctagaattatcttcaacgtcatcatcaggaacttgtccaccgccattaaagccgccttctttgacaacagcatcgtaaacatcagcaacttcattaccaatgaccacttgatactgaccaccagctttaacaacagttacaacaccatctgtatcttttaaaacatcatcgttagcctttttttcatcctttaatttaaaacgcaaacgagttgcacagtgaacaacactggtcacattatctttgccaccaacattttgaatgatggtcttggctaattcatcatagttcttagccatttgcctttcctccttaaaataaaaacccaagctactcaaaaactaaagaacataaatgttcaacgtctttcagtaactcgggttcatgcctaatcttcttagtaacatacctaagtaacttagatatttaattatcttgacgactagttacgcgccaaatatgtaaaacaagataaaattcatcatctgaatctaaatcccatcccatttttgcatgtaagtaagtggtgatccgctccgccgtctcatacgctttgctatatttgattttcataaaacctagcattgcaggatcaagtgaagcctcctccttttgcttatttcgtaaaaatctaactaacaaaatgcgcaaatgcgaaacaaacctactatagttaaaggagctcgtatcaagttgcattgaatattgcaattgaataatatcgattatcccacgaatcaaatttgtaatctgaattgtttcttgtacttgagaaacatcactcttagcattaaccaggtgataggtcatcaaaaacgactcactctgcggcaatttaatctgcatctcctgattaattagattgaccacttttttagctgccgcaaattcttttggaaaaagattttgaacttcccaactattgttagcgggagctatatcaatatgatctttaattcgcgtaactgcaaaatcaatgtgatctgctaaagcaagatactgaaagtcattgaacttaatctgaagcagaggttcgaccagctgaagtaccttattagttacttcaattgttttagggtcaaagcccttaacttgatccacttcgtctttagtaacgaagcgacgttcaattttgctttcatcaacaggatcacttttttttagaccaaatcctacgcccttgcctaggactatttcttcttgaccttggttattttcaattaaggcagcactattattaaatgttttaagaaatttcataataattcaccaccttagcaaaaaaagaaaaagctatcacaaataatgatataccaacgcaacattatttgtaatagctaagacctgatcgtatcagtaatccgctcacttacagttattataatagccaatattgtaagcggtgtcaatataattttgtgaaaaaaagcaaaatattttacaatgaactaaaaagcgaggtaattaaaatgaaattcgttcttgcacctgattcatttaaagaaagcatgacagcaaaagaagtctgcattgcaatgaaaaatggtattcaaaaagttattcccaatgcacaaataattgcggtaccaatggccgatgggggcgaaggtacaactgattcactcgttgatgctacaaacggtcgaaaataccaaataaatgttaccggtccgcttaatcaaaaagtatcagcttattatggcatctcaggtgatggacaaactgcaatcatcgaaatggcacaagctagtggtctctcctatgttgcaaaaagtaaacgaactcccgaaacaattttaaagactacaacttatggaaccggcgaattaattaacgcagctttgaagcacaacgtcaaaaagattattatcggccttggtggtagcagtactaatgatggcggtgctggtatggcacaagcgcttggtgttaaattttttgatcaaaatcatcatgaaatcacccaaaagttagcaggcggtgctttagatcaaattgctaatattgatctttcttcaattaatcctcgtattaaagataccaaatttttattagccagtgacgtaaccaatcctctaactggacctaatggtgcaagtagcgtcttcggcccacaaaaaggcgcagatgatacaactgttaaaattctagatcaaaatttatctcactatgcacaagtaattgagcagactattgataaaaacgtcgcccaaatttctggtagtggtgctgctggcggcctaggcgctggcctgatcgcctttactaacgccagtattcatccaggcgtgcaattaattgcccaagaaactaagcttgaagccaagatcaaagacgctgactatgtttttaccggcgaaggcggaactgattttcaaactaagtttggtaaaacaccctttggtgttgctaaaattgctaaaaaatatcacattcctgttatttctttagcaggctatttagatcaaggtattgatcaactctatgatgaaggatttaccgctatatttggcattcttgctaaagcagaagatattgagcaagccctaaaagatggaccaataaatgttacccgtacaactgaaaatattgttcgtttaatcgcacaaaaataagatgagctcgatgcccatcttattttatttcgttaatttcttaattaagccttcacagccacgataaatttcattatacgctgtttcaaaatcatttgtataccaaggatcatcgacatcagcataagagccagcaaactctaaaattttatgttctttatgctctgggtctccaccagtaatgcgattcatatctgcgaaattttcttcatccatgcagattaaatattcataattatcatagtctgagcgagtcatttgactagcacgatgaccacgatcatatggaatatgttttgcaactaattcccgttgtgcacgagcatcaatcccatgacctaaagcatcctgcgtagttgctttagattcagcagtatattgatctgctaggttattttcttttaacaaatattgcatcacggcctctgccattggtgagcggcaaatattgccatgacaaacaaacagaatttttttcattaccttttcttcctcttagttagtctatttataaccggccaaataatcgccgtaataactccaactgttaagccaacccaaatctcctgcgacaaagttacaagaatgccactataaactcgactttgcaatgcggtcatcgcctcatttgaggcaagccacaatgccacaaatgaagcaatagtagctagtgctagtggaattgacgccgaagagcgaccaaataaaatcaaaattgcggctaacaaaaataacaaagccactgcaaaaattgaatactcataaattgtaataatatggttcacatcttctgaatcttccttcaatttatgattaatttgcttgactaaatattcattgataatttcttccaacttacttttactagttaagcctaaatctttagtggtcaattttccctgatcattatatttttcacacaatctatatagatcagcatatgataagttaacttgatatttcggcggcaattgttctaacaatgtcttttccaaaccagatgcttcgagtaactcaacccctgccttcaaattaggattatctgagtcatccactactcgattgattacttctttgcccatcgcctgtgtatcgtttatttttaaattcacattgctagtcattaataaccaaaaagatactgcggctaggccgaccattatcaaacgtagtattattttgacgatgttcttcatctaaaaatcttcccctaacatctacttttttcagatggcaaacaattgcaaggcaccatgtcaggagcatccttttctttcaatttaagttcttgctgcatcgtcttaatatcgcccttagaaagcggtgcttcttttagcaactgaattaatacctcacccttgtgcatatcacacatgttttgcatcatatgtaaagtaacttcagacatcattttgcgctgactaatagtcggcttataaacaaaacacctgccttctttacgcgtctttagcaagcccttttgcactaaacgccgcattagcgttttaattgtggaatcggaccaatcctttttaccttgtagttctttgattacttggccagtacgaacttctcctaaggtccaaataatacgcataacttcccattctgattgggtaatggaattacgatcgtctttagtttctgccataaaacatcacttctaaatccaaattttttactaaagaacaaattttttcaaagcctttgcaatcccgttgtgatcattatcatcagtaacataatcagccttatctttgatctcactaatggcgttacccatcgctactttcatgaagttgggattagaaaacatcgaaagatcattgccttgatcaccaaaaatcatcacgtctttttgggcaatttttagccgtgaagccaaatccattaaagcattaccttttgaagctcccaaggcatttaattcaataatactgtcaaaactgcgaacaatgtcataagtctgaaaagcccagtcggggaaactattccacagtttttctacctggtcagctccttcagttgaagtaaaaccgactttgttaaaagtaaaatcttttggaatttcttttcggtctctaactttcataatattatcggtcaaagccgcattaatttgcatttgcacagataaatcccgatcagttgtaatgaaatacttagtcgtctcaaaatgtacatttacatgacttaaacgctgaaaacgcaacatattattgaagtcttgataattcaattcctgactcattaaaacacgaccagaaattgtttgaattactgcaccattaaagacgattgcatattgatcatcaccttcaattcctaattgcttagcaaagttcaatactcctgataatggtcgtccagtagctaaaacaaccttaatcccattttgtactgcgacacgcaacattctttgcgtttctggcaaaatagtattattgcttgataataaagttccatctaaatcaaccgcgatcaatttaatagccattttaatccctcggatcttaaaaattacatctagcattaattatacaaaaagccgtgatttaactcacgactttttacttatcgattattcaattaggattttacttacccatttccttttcgaccactttaacgatacggtctacataggcatcagtttcttcttgagttggtccttcagccattactctaagcaagtcttgagtacctgatggacgaacaagtacacgaccatttccagccatatccttttccactgcagcaatttcatcaagaattggttggtgttctttccagctcttcttgtcagcaaccggaacattaactaggcattgtgggtaatctttaaagtctttcaaaagttcacttaatgacttaccagtcttcttcattacgagcattaaatgcaaaccggttaacataccatcaccagtattatgataatcactcataataacgtgacctgattgttcgccacctagattgtagccgtgagcacgcatttcttcagaaacgtaacggtcaccaacttgggtacgaacattcttcaagccttctttttcaagagccttagtaaaaccaagattactcattacagtagtaacaatggtatctttcttcaaacgaccatgttctgccaagtatgagccgagtacgtacatgatgtggtcaccatcaacttcattaccattttcatcaacagcaatgcaacggtcagcatccccatcaaaggctaaaccaagttgagcaccttgcttaacaacttcttcttgtaacttttcagtatgcgttgcaccaacatgatcgttaatgttcaaaccatctgggtgagttgcaatagtagtaaagtcaacgccacaatcagcaaacagtcttgagatcaatgcgcttgaagcaccgttagctccatcaataactaccttaattccacccaagtcttctggaatagtattttcaataaattgcaagtatttagctgaaccttcgtggaagtcagttacagtacctaatcccttagcagatggacgaggtaatttatcttccttagcgtcaattaatttttcaatttcgccttccatttcatctgaaagcttcaaaccatcgctaccaaagaacttaatcccattatcttctacagggttgtgtgaagctgaaatttgcacccctgcatcggcgccttgtgctcgtactaagtatgaaagacctggagtagtaattacgccaacctcaagcacttcaatcccaactgaaagaaggcctgaaatcaaggcatattcaagcatttggcctgaaatacgagtatcacgagatactaataccttagcttgttcgccgtcttttttgttcttagttaaaacataaccaccatcacgacctaatttaaaagccatttctggagttaagccttgattagctacgccacgaacaccatcagttccgaaatattttaacatttaataaacaacctttctcaaattaattattcgcattctttactttaattgatatctgtacattttcaggatcaacgcgagcaactcccttaggtaaaactaaagggtaattctttacagttgaatatgagattcctttcagatctacatcaacatccaactgcttaatctttgctaatgtttccttttgtccatacagtgttacctcatcattcttggcagtaaccgaatagactttattatttttttcatttttaggctttaaatttagcttaactttctttttgaaaagcgatattggcaaactagcttttactgtagatggattaatcactgcatttaattgacgcccgtttttatcttcagctatcaaaataacttgacgctcataatcatgattaatgccattaggtaaaggcaacttggcaacgatctgatcaatctgatttacttcgcttctagcaccagtaacctcaacttgctgcggatcaacactagccgtaccaatattatatccattagcaacagcatttttattatactctatttgaacgggcatggtacgagattttcgccgttcaatatcaacattaactgttgccgggttaatcgtgtaagataattgactatttagtcccgtaacttctacctttacggtttgcttacctattttcttatgagttagatcaatataagcacggaagctttgagtattaacagtcgaagtaaccaacgcattcgaaccctccaaagttatcttaaccttttcaggataaccaacaacatagtatttatctgtattaaccgaaacttgcagaggaacactaattgtctgcgtttcattagcagtttgccgtgtcttcttagattcaccctgtgtaacaaaacctgtttgagtagagtcaatgtaaaccactaataagatcgcaaacagcaatgagattattctgattacccagcgtttatcccaaaagtctttcatcgatctgcaccccatttccagactttattaatcacacgacgaatccatggaaccttcttctcttccttaggaacaagttgagcattcaaatacttcaaatattcttcacgagacaaatctactaaaaagcgcccgtttctagtaatagttacgccaccagtttcctctgagacgacgatcgttaccgcatcggtaacttcagaaataccaacggcagctctgtgacgcgtgcctaaacgcttaggaatcatgctgttatctgacagtggtaaatatgctgctgcaacagcaattcgattattattgataattaccgcaccatcgtgcaacggcgtattagggataaaaatattaattaataattcaccagaaatatccgcatccagcttgattccagtttcaatataatcatctagccccgtatcttgttgaatcgtgattaaggcaccaattcttcttttagacatgtattgaatcgctttatcgagctcctgcaccatcttaaccgactgtgtatgagcactctcacctcggccattaaaaatcggcgtgcgtcctagccgctctagtccacgacgaatttccggctggaaaataacgataattccgattactgcccaagaaacaatttggtccacaatataagttaccgcatgcagttgcagtaagccggcaataattctaacaataaagataaagacgatcccttttgccagttgtactgctttggtaccacgaatcatcatgatcaaacggtaaactaaataccaaatgattaaaatatctaaagcaatggagaaattattccaagtaaacagattagaaatattaaaatgcattgattgctcctttcttctttaattataaccgccccaatttaccgtgcatacattttaaattctaaaaataggtcattatattcttgggtcttcttaggacctaaatctctaaagacctgtagattcttcaacgtactttgagtaggataaaactgccggtcatctctaacttttttcggcaataatttttgggctgcggtatttggggttgcatatccaacatattccgcattttgcgctgcatttttaggttcaagcataaaattaataaacttaagtgcagcttttttattttgtacagttttaggaataacaaaattatcaaaccacaaatttgatccttgcttaggcacaacataatgcaagtgaggattttgttccatcatttcataagcctcaccagaccaggtaacgccaattgctgcctcattttgcactaggtacatcttcatttcatctgaaataatcgccttaatattgggtcccagactattaagcttagtttgtgccaaatgtagtttaatactagatgtggtattcattgaatatcctaaagaaaccaatgccatccccattgcatccctagctgaatcaactagtaaaatttgcctgcgatactttttactccacaggtcattccaagtcttaattgcccctggcttgacgaatttatcattataaacaattcctagtgtcccccagaaatatggcacagaataatcattattttgatcaaatgacttatgtaaaaaactcttgccaatatatttcaaattaggaatttgcttttgatccaactgatcaagcaaatgagccttgcgcattttagttaccatatactcagaaggaatggtcaaatcatatgccgttccgccttgtttgattttggtatacatcgcttcattggaatcaaaggtctcatagacaacatgataacctgtctgcttttcaaacttttttattaactttggatctagatagtcgccccagttatagataatcaagttttgtttatttttcccggtagacgatttctccaaatgatgggataaaccccaaaggcctgcacaggcaattaaaatagctgcaattgccatcataatctttttcatttaactaggcctcccatcacacgatgatttttctttctgccctttttagtagtaataaaataatagattcctacaagcaacaagacaaaaatgaacattacggtacttaaagcattaatctcaagatcgattccttgtcgtgcccgagaataaatttcaactgaaagagttgaaaaaccattcccagtaacgaaaaaagttacggcaaaatcatctagtgaataggtcaacgccataaataaaccggaaaagatgcctggcataataactggaattaaaacatcactaaaaacctgccatgaattcgcccctaaatcacgtgctgcatcaataagcgacatatccatttcattaagtcgcggcaagaccatcaaaaccacaatcggaatagaaaaggcaatatgacttaacaatacagaaccaaaatttaagccaattcccaatgctgtaaaaaagatcaaaaaactagcaccaataattacatcaggtgacaccatcaagacattgtttaatgctaaggttgttttcttattagattcttttttcatcgcagcaattgcaattgcaccaaatgtcccaataattgttgctattaaactggacaacagcgctagtaggatagtttccaaaaatatcgctaataagcgattatcttgaaataaagtctgataatgagcccatgtaaagtgctcaaatttattcatgtttttaccactagaaaatgaaaagtaaatcaaataaaaaatgggtacatataataggatcaaagtaaaagcaagatagatcttagcgattaaatgtctgtttctcataaatctaccttctttcttctagcctttttgctagtaatcaacatgactaccaccatcagcgcgattaaaattactccaattgtggcccccatattccagttcattgtggtcataaaatactcttcgatagcagtccctaatgtgattacccgattgccgccgatcagccttgttaacataaataatgacaatgatgggataaagatggcctgaacgccgctttcaactcctggacgagaaagcggccataaaacatagcgaaaagtttgccatttactagcacccaaatcctcagaggcatgaatgactgcaggattaatctctttaatcgcattaaaaattggcaaaatcataaacggaatttcaatgtaagtcgccacaaaaataaaagcaaaatcagtaaacaaaatatttacgggaccaataccaaataaatgtaaaaatttatttactaaaccgtcattacctaaaatgccaataaatgcatatgctttaagcagcaaattaatccatgttggcaaaatgatcaataacagccacagctgctggtttttcattttaattaaaaaatacgctgccggatacgaaattaccaacgtcaacaaggtgatcaaaaatgcataccaaaatgagttaagcatcatttttaaaaaggtaccatttttaaaaaattcaacgtaatttctgagcgtgaatgcgttattactatcagtaaacgaataccagagaatcaataaaatcggcaaaatgacaaagagaataatccacagcagatatggaatcataaaaaacatctttttatttttcattttcatccgcctcatacttttctagtcgagcatcaaaatcgtgttggctttcatttaaccgcatgacgtgaatatcttctggatcaaaaaagagcccaacacgttgtcccaatttaactccattagtagaatggatcagccattcattttcattggcatcaattgccttaatctcaaagtgatcacctaaaaataattgcgtctgtgctgtaaccacaatcttcccatcttctggtttaacaatatccaagtcttcgggacgaataactacttcaaccttttcattaggcttcatcccaccatcggcacatttaaatttattattagcaaattccacttcgtaatcatgaatcattcgaccagataaaatattggagtcaccaataaaacgtgctacaaagtcattcactggctcatcgtaaattgctaccggattaccactttgttgaatctgcccatcatttaaaacaaaaatttcatcactcattgatagagcttcttcttgatcgtgcgtaacaaaaataaaggtaatgcctagctttttctgaattgcccgtaattcaaattgcatgtcttttcgtaaacgtttatccaaagcagatagcgactcatctaatagtaaaaccttaggttcattaacaattgcccgggcaatagctacacgctgctgctgtcctccactaagttccgaaatttcgcggttagcgtaaccgtctagacgaaccatatgcaaagcatctttaacagctggcttgatttcactcattggtcttttcttaattttcaagccaaacgccacattttgaaaaacatccaggtgtggaaacaaagcataattttgaaaaactgtattgatatgtctttttgaagcatcaaggtcagtaatatcattaccatcaaagaggacttgaccactagatggctgagtaaagccagcaataattcgcaaaattgtcgattttcccgagccactaggaccaagtagtgaataaaatttaccagattcaatagttaaatttatatcttttaatgctacaaacccatcatcatattttttggtgatgtgttttagtttgataatatccatttccatccctcacataaaaaacagctgcaagccttccagcctgtagcttgtctttgctaaaatattttacttttctttgccgataatcctaacttctgtgcgtaagtcaatgtcaaacttttctttaattaccttttggatcaaatgaattaaattcaaataatctgttgcagtagcaccgcctttattcacgataaaacctgcatgtttcattgaatcttgagcgccaccgatttgtttaccttgtaaaccagctttaataatcatcggaccaacaaagtgcccagtaggccgcttaaagacactgccacaagatggatattcaagtggctgcttataacgacgtaaagcatttaaataatgcatatgatctaagatctctaacttatcgcctgacttgagtgcaaaagtggcgcttaatacaatatcgccattttcttgaactaatgaatgccggtaagaaaagttcatttctgcgtttgaatatgttttaaattctcctgctctggttaaaacattaacgctttgcactacttcttgcatctcaccgccataggcaccagcattcataaaaataccaccgccaatactaccaggaattccagcagcaaattccattccgctcaaaccatgatgagcagccgcaaaagctgtatcgataatccgtgcaccagcatcagctgtaacttgattatcttctactttaatctcttttaattcagtcaaaataattactaacccatcaattccgccgtcacggatgattaaatttgaggcattgccaataattgttaatggaatttcattttcacgtgtgacttttactaattgttctacttcatcagtcgtcttaggaaaggccaaatattcagctggtccacctgtcttagtaaaagtatatctgcttaatgggatttgctctttaatatcaatccctttttctttcaaatcaagtaattccacgctgttgcctccttaaagtttcttgttttattttaccgcataaaggcgttagcttcattaatattaatgatatacttttttaaaaggagaattttatgaattttattgcaatggactttgaaacagccaaccattatccagaaagtgcctgttcacttgctttggtaatggtgagaaataataaaattgttgatcgcttttatacagtaattaatcctcaaatgccatttgacgcgcgaaatattcaagtacatcaaattacagctgaggacgttaaaaacgctccaacaatggcagaggtctggccccacattaaagaattgtatcaaccaggaatgcttgtagccgcacataacgctcgctttgatactaatgtcatgcggcaaagcctggcacgttacggtattgaggagccccactatttggtcattgacactttagctagcagtaaattactcgaaccagaactgcctgaccacaaattagacacagtttctgaggccttaaacgttgaattgtggcaccaccataacgcattaagtgatagtgaagcatgtgctgggattttaatcaagcaagaagagcaatttggtgatgaagcaatcaaaaatttggtttatcagatatgaaaaatctctaggaattttgatcctagagatttttgctttacttattaaattcagttaacgcagctttgacccattcttcattgcgcttaccatgaggagtaaattcaacaacccgtttagttgaatcccaactatcgtccactctggtaatcgtaagttgcaaatactcatctggcaaatcattcattactagttgtggccattcaattaccactaaacctggttctgctaaatagccctccaaatcaatcgaggataaatcatcattttccaaacgataaaagtccatatgaaagagcggcaacttagcttctcgatattcacgcacaatggtgaatgtaggactcttaacaggccgatgtatgcctaatgctcgccctaatccttgagtcatggttgtcttgcctgcacccaaatcaccatttaatagtaataaatcgtagggctgggccgttttggctagggatgcacctaatttctgcattccatcagcagaattaatttctaactttgtcattacttttcatcctttgctaaagcttgtgcggcagtaacaattgctaaatcataaatatcttgttcactgcagcctcgagataggtcattcactggagctgctaaaccttgcaaaattggaccaacagcagtgaagccacctaatctttgaaccatcttataaccgatattgcctgattgtaattctgggaaaacaaagacattcgcatgtccagctacctttgagtttggagccttcttttcactaactgcaggtacaaaagcggcatcaaattgcaattcaccatcagctggaatttctggatgatccttttggaacatagctgctgcatcatgtaccttatcaaccattggtccttcggctgaacccttagttgaaaagctcaaaaatgcgaccttaggatcaatttcggccatcttggcagtcagagcagattgatagccaatttcagctaaagtttcttcatcaggattaatgttgatggcacagtcggcaaaaatgtaacgctcatcgcccttttccattacgaaagcgccggatactcgatgcatccccttagctgcatgaattaattgtaaagctggcaaaacagtgttagccgttgagtgagcagcaccggaaaccataccgtctgcttttcccatcttcaccaacatggtaccaaagtaattaccttgggctaacttgagctttgcttcagcaatactggtatcttttcgtctagctttaacaaattccgctgccatttgatcaagttcatcataatgattgaggtcatagatcttaacaccagctaagtctaaattattttctttaactaacttagcaatctcatctggatttccaattaaaattggttcgataatgccatcttttttcaaattagctatggcagtaagaattcttaaatcatcgccttctggaaaaacaattcttttcttatcttttgctgcttcaacttgttttttgaataatgaaaatacgctcattttttacctcttatgctaaatcagatttacttatcgtttctggcaattgccagtcaatcggcgtttcatcaaagttcttcaatgccatattacaccgcgaaaacggtcgcgagccaaagaaccctcgatcagccgaaaatggacttggatgtgatgatttaatgataaaattcttactttgatcaattaatggaatcttgttttgagcaaatcgaccccacaaaataaagacgacttttccacgctcactcagagccttaattgcagtatcagtcacatcttcccaacctttgccttggtgaccgttagcatgcccatacggtaccgtcaaaaccgcattcagcaaaagcacaccttgatcggcccacttttttaagtaaccgtgattaacaggccgagctccgacatcatcatagagttccttatagatatttttaagtgatggcggcaaagttgtacctggcatgacggaaaaactcattccattagcttgaccaggattatgatatggatcttgacccaaaattaccactttagttttagcaaacggtgttaatttaaaagccgtaaaaatatgatacatatcaggataaatttgtttagtagaatattcttcttttaaaaaattatgcaattcgtgatatttctcacttgcaaaaacaggatccaatacttgatcccaatcgttgccaattaattctttagccaagtcttacaccctcttttcttctcctctttatggtatcattaatttaatactaaatgggagagaaattatgatcaaattagttgcttgtgatcttgacggcacgttgtttaattcagagatggctgtttctgctgctaatgcaaaagctgtgaaaaatgcacaaagtagcggcattgaatttttaattgcgactggccgggccccacgcgaatcacgttcagttctcaaagatgctgatttgcataccagttttatcaatcttaatggtgccctggtttttgacgaaaatgagcaattaatgatcaaacacagtattcccaaggcaaaagcacaacagctagtgcatttactacatcgatcaggcttttactttgaaattttaactgccaatcaggtttatagtgaaaatctagatcaacgtatttcaaatgtagctcatttaatggtagatctaaatcctctacttgattttcgtcaagctgtagcaatttctgctggtaataagactattatgaatatgaaacaaatccacagtttcgataatttattgcaagatcctaaaatagaagtaatgaaaattattgcttttgactctcggggacatgaagcttttaccgatatcaaaaaagaaatcgctacaatgggcgatctagtagtaacttcaagttcatcttctaatattgaaatcaatgagcaacatgctcaaaaaggtcttgccttacttgattatgccaagttaaaaggtatcgagcctgaggaaatcgctgcaatcggtgataatttaaatgatgagagtatgatccgagcagcaggtactggcgttgcgatgggtaatgcgattccagctattaagaaaatagctcaggtagtcaccaagcgaaacaatgaagatggagtagcttatattttaaataaatttattgcagataataacaatatttaaagttatgaggtgagtaagtatgcgattttggctagaacttaatcaggaaaaggattacggtcaaattcctgtgcttaatcaaaatggaaaagctgaattttttattcaaggcaatcttgataatccaaaccacactttatatctaaataatttccgtaaacaggaagtgggacgtctgttttctgatggtgcgggcctaattgcttcgttcacaattgatgtcgtcaaccactctttagtaggcgtaaaaaagttaaacacacctactgcaaacatattctatttgacccaattaaagtatattgttacaggtagtattaaacgtggtacttatacttttcgttctggaatcaagagtgtagcaagtgtccaaacaatcatgggagatcgcggaggcgttttaatttgtgatattactaagcctgaagacgtcccctttattcttttgacatccgttctatttacacaatggcatgttacgcctttgaaactgcctagttttccgccaattggatttgaggtaaatccaaattaaacaaaaaagcagtcatgaaaattttcataactgctcttctagaaagtgatatagatatagatgtatcttctgccataaagtttatatttattaagtaataaggaattattaggcagagactgaataatgaaagttaaatctaatttgattcaacctccatagcttattatacttcgttcagccaaaaatacaagggctagatgttattattttactttaaagatagctaaataatgcatttagagctagcttatagcttaataatttgttatttaacttagtacatctatttttctaaacaagacaactttaatttctacgtaaattgcaataataaattgaacacttttaatcaagctgcttgatagattagatctaattctctttcaaagatttcatctggtgtatgatatgccaatatctttcttggtaaagagttgcaccaggtttcaatgtctatgatgtcttgtagtgaataattgtctattgcctctcccttaggaataaatctgcgaatgagtccattatgtctttcaacggttcccttgtcacaagatgtataaggatgagcatagtaaactaaagtatttgatacgtcttctaagcttgaaagatctgcaaactctgagccattatcagtggtaatggttttaaaaatatcattccaatgttcgctgtattgcctttggagttctttaaaggcctgcatgacactgacagaagtcttgtcaggaatacgaagaattaagaactcacgactcatacgttcagataaggttagcagcacctcatcatctttgctcttatgtccgagaactaaatcgcattcccaatggccaaactcattacgtttattgatttctttaggacgttcttcaatgcttctgccaagttttttcttatttctgcgaatacgatgaagcttggtattgcgtttaagcttctctggcaagtcgtaattatgtatatctaatagaccttggtcgacataattgtaaagagtcttagtacagacaacatctctgctgctaaatgcgccaacagcggtggcgcgattactgcacacatcaagcgaccagccgtctttaaagaaatgtttgtggacatagcgcatgaattgagttttcctgagaaagtctgatttacgtccacaatttttacgatgagcttgatatgcatcatgcccttgagtagccttatatcttttgactttgccatgatacagttctacagtaccgcgcttaacctcataactgatagtagaaggggaacagtttaattcacgggcaatggcacgcaaagaatagccatctttcaaacgcaattgaataataactctttcctcgaatgataaatgcttgcctttaatgtgatgattcatggtagaatgtaaagagtccattttgacctcgtttctaaatgttgtgtggtaactacattctatcaaacaggtccgaatggactttttattttttattaagtgttcaatttaattttacaatcagcgactttaatttctattaaaaaatatagtgaaatgatcaagtgatttatcaatggcttgatcatttttatttactttatcaacgaacttgtttttagctatcaaactatataaaaaagagccaaatctaatgatttgaccctaaaaattctagattattaatctaaattattttttatgaattagtcttggtagtttaccaattctaagaatgattctggtactaatgaagcaccaccaaccaagccaccgtcaatatcaggcttagccattaattccttaacgttagctggttttacagaaccaccgtattgaatacgaacgttttctgcagtttcttcgttgtacaagtccttaacagtttcacgaatagtcttgcacatttcttcagcttgatctgatgaagcagtcttaccagtaccgatagcccagattggttcgtaggcaataacaagtgaagatacttgttcagcagttaagccgtctaaagcagccttaatttgagcaactacccagtcttcttgcttgttagcttcacgagtttcaagtgattcaccacagcaaatgattggcttcaagccattagcaaagattgccttagccttcttgttaatgtcttcgtcagtttcgtggaagtaaccacgacgttctgagtgaccaataattacgtagtccatacccatttctttcaagaccttaggtgaagtttcaccagtgtaagcaccttcgtcttcaaagtaacagttttctgcaccgatatgtaagtttgagccttcagcagcttttctcaaagcgtcaaggtcaactgcaggtgcacaaataagtgattcaaccttacttgggtctggtaacttatccttaacagcgttaacgaattcagtagtttgttctggattcatatgtaacttccagttaccagcaataattggtgtacgactcattaatctattgtcctttccttactattacttgtctgaaacgcaagcgatacctggcaattccttaccttcaaggtagttaagtgaagcaccaccaccggtagaaatgtgggtaatcttaggagcaatgcctaattgcttagcagcagcagttgagtcaccaccaccgatgatagtagttgcatccttaaggtctgccaatgcacgaccaacttccaaagtaccttcagcgaagttaggcatttcgaatgcacccattgggccgttccaaacaacagtcttagcatccttcaagatttccttgaacttttcaacagtcttaggaccgatgtcaagacccatcatgttgtcaggaatatcatcaccaacaacttcacgtgaagcatcatttgagaattcagttgcggctacgttatctacaggaagaacgatcttgtcgccagccttagcaagtaattccttagcaaggtctaccttgtcagcttcaaataatgatttaccaatgctgtggccttgagctgctaagaatgtgtaagccataccaccaccgattaaaatatggtctgacttaggaattaagttttcgataacaccaatcttgtctgaaaccttagcaccaccaagaatagttacgaatgggtgtactgggttttcaacagcatcacctaagaacttgatttccttttcaagcaagtaaccagctgctgcaggcttgccagcttccttcatagcagttgcgataccaacgtttgaagcgtgacttctgtgagcagtaccaaatgcatcatttacaaacatgtcgccaagacttgcccagtattcgccaagcttaggatcgttacctgattcacgcttaccaaagtcgttgtcgatgtcttggaatctagtgttttcaagaacgataacatctccatccttcatgttgttgatagcgtcttcaacttctttaccttcgtttgatggtacaaaagttacaggcttcttaagaagttcacttaaacgttcagcaactggctttaatgataattccttcttgtcagcatctgacttaacacgacctaagtggctaagtaagatagccttgccaccgtgttcaatgatgtacttaatagttggaagtgcagcaacgatacggttgtcgtcaccaataacgccatccttaattggaacgttaaagtctacacgtactaagacctttttgcctttaacatcaagatcgtcaacgattaatttagccattataatcctccgattattttgatattttttcttcaaaaaaaggcggaaggaagaatctccctccgccttctcaattaccacttaactatataatcagttaattaaaattaatgattaaagagttgcaaagtgtaataaagtacgtaccatttggcaagtgaatgagtattcgttgtcgtaccaagcaacagtcttaactaattgcttgtcacctgcagtggttaccatagtttgagttgggtcaaagattgaaccagcagtcatgttaagaacatcgctagaaacaatgtggtcaccgttgtaagcaaatgatgggctttcgtacttcttcatagcttcgttaacttcgtcagcagtaaccttcttgctcaagattgataccaattcagtttctgaaccatctggaactggaacacgttgtgcgtgaccgttcatcttaccgttcaagttaggcaataccaagccgatagccttagctgaaccagtagtatgaggaatgatgttttcagcagcagcacgagcgtcttgttccttaccactacgtgaaggaccatccaaagtcatttgagtaccagtgtatgcgtggatagtagtcatagtagcaacttcgataccgaattccttgtccaaagcgttagccattggtgcaagtgagttagtagtacatgaagcagctgaaacaatcttgtcatcagcagtcaaagtgtcttcgtttactgagtaaacgatagtcttcaagtcgttaccagctggagctgagatcaatacacgcttagcacctgcatcgatgtgagcttgtgacttagccttgctagtgtagaaaccagtacattcaagaacgaagtcaacaccatcgttcttaacccatggaatgttttgtgcttgtggttctgcgtatacgtggtaactcttaccgtcaactacgattgaatcttcagttgatgaaacttcgtggttgaaagtaccatgagtagtgtcgtacttaagcaagtaagcaagcattgctggagtagtcaagtcgttgatagcaacaacttcaatgtcctttgacttttcgccaaggtccataatacgacggaatgctaaacgaccgatacggccgaaaccgttaataccaattttaactgtcataacctaaagtcctccttaagaactataaacaacatttattttaaacgggatttcatttcccctttaaaatcatatttgaggcgccctcatcagtgattagccaggtttgatgaggcgcattaggcatataagctttaattgcttgagcctttcgggcaccacaagcaaaagcaaatatgtggggtattttgtataggttctcgaactgcaatccaacctgggtgatgcggtcaacaaccttgccatgttcatcgaagaaacacccgaaacattcggtgacggctctcttctcacgaagttcagatagcttaattgaattatagcctctgcgctgtgccatttcttgagctaacccaataccatgaatcacagcatcactttgagaaatgtcttgcagaacatctgcgatcgaggactcacgaatcaaagatttgtaagcatcatctgaaacctgctcaggtaaatataatgtcttataagtacctgaagtcttagcagccatttcttggacgattgtattactttgcgtctctacattttcgcccaaagctcctcgacctggaacaaattccaactggcgattgttagctaaatctggtgataaatacttagcagatctagctaacgccgctccacctagaattgtaactattgaatggcctaaaggcaagagtaaattcaaagctgaacttaatttttctcccatctcctcatatactcggtcttggaaatccgcattaccagggacgatcaatgttctttcaatccctaattttttggctaatgctacttccgtttcaccggcattaaagaggcgatcaagcaatggtcctgcatcttttaatgttttctcacccttttcagttaaaaacatcccaaaactttttgtttcaatcaatcctaattgacataagtactcagtctcagttctgatgtttctctctgaaagccctaaatgctgagcaacactccgacgtccaattggcgcatgtagcgaaatctgctcaaggacaagatacctttgtcgaagaatctttaagacgtcgggaacgagcgcttcgagcaaagaaaagtccgaatccatcgttccctcctttccatgggacatctatcgaccacctacgtgtcgttttgtgtcccagaatgcttaaaaatataagagaaacgtacttttcattcaattcatacatttcccaatcgacactgttagtataacaatgtatttttcgtaattcaagaaaaagatacacgattttaaaaaagtcgtaaatcgagtaaaatcatttttatttcattactttttttgatatactaccacttgtgaatcatctgggcccttagtgtaatggatcgcacataagattccggttcttagaatctgggttcgactcccagggggcccatataactacatgttgaagactaccgccatctcggtattcttctttttttataccaaaaaagcattcctcacggaatgcctttttcaatatcacaattatttagtgcttgtagtcatcaactcagcacgttgtgctaactcagtgtacaaagttgagcctgaaacagataaaccttcaatttcacggcgagtgttgaaatgatggctacccttataagtaccatttgctgctacacggaagatgtagtcgttaaaaccaatatagaattgattgtggttgctgtcataagcaaaaccttgaactggtgaaccagttacgaaattactttgagtagcaccgatttcttctggagcccaagtgtcaccatttctagttaacttccagtattcatattggtgacgaccaccattgtggaacaatgcatacatagtgttgtcgccaacaaaggttgcattatggaagtaacgaggatatgcactgctgccgttccaggtcttaacagtccagattttgttaatcttcatatcactctttcttacttgcataatttcttctgaagctgttgaattagcagtcttattgttattagccaaaacataaatgtagcttgaagaagagccaagtgattgaccatgacctagcttaatgtatggtgaaactttaatattgtttgcgtagcttctaaaagtgctccatcccatagtagttaagttttgagcagcatatttactcttaattgcattcaagttgtaagaaacaagatgtcctcttgagtcgctactgctagtgtacatagaagctgtaaaaataccatcattaacagtaataccttcaggaattaccccaacttgtcccattgcatcagcagcttgaccatagcctaagctgacaaaacgtggttggaacaaacgagtgcgcaaagtcatgccgttacctgaatagctatttgagctagtttctgaacgataaccgtgtgcctgattccaatttcttgatgatccctttgagccaccattccaagtatgaactgccttaggaccactcttaacagaagcacctgcactagtaattccttcatttgtatctgaacgaacagttacattaacgcttgcctttgccttaccatatgaataatctaccttagtagtgccggcacggcttgaactaacagagctatgtgaaacattaaccctatctggattaattgcagtaccttgtccatctgttgcatagttaattgcatccctagttggaaaactgtagttgctgttgtgaactaagctaacatcttgagctactgaaatttggtttctagcaaaaaagttttgacttacccaacctacattgcgtccatcgacaataatgtaccagaagttacctttcttggtagaaacatacttcttagattgaatttgaccatgcttaaagtacttggtatttgaaaatgcacctgatggtccttttttagatacattatgataaatagcgtaattaccattgccagcaatcttagtaactgccttgctgtagcttttggcatctaccttgctttgactaatggcaaaaacaccaccaactaatgcagcactggccacaaaagttaataacatctttttcccttttaacatccttattaatcctcccatatgaaaaaatcacgttcattttagcacaaatttatcaaatgaaacatctaattattaaaaaatttcctgaacaacaagactttgaaaacgcttctgttatataattaaaaagttcacataaatatataaatagtaatagggagaaattttatggtcgaatcacaaaataattccaaaaagatgatgtggaccaccctagcaatgatggccttctctaccgtgtggggctttggtaacgttgttaatgggtacgtctactttgacgggacaaaggttgtctttagctggatcgtcatgttccttctctactttgttccttatgccttaatggttggtgaacttggagctaccttcaagaatgctgaaggtggggtttcctcttgggtaaatgccactatgggcgcaaaatgggcctactacgcaggttggacctactgggcttgccacgttgtttatatttccagtaaaggtactggtggtttaagagcgatggcctggggtatcttcggaaatacaaaatggtatgatggcttacctaccgcttggacacaatttgctacattagtagtcttcttgcttttctgttgggttgcaagtcgtggtattccagtattgaaaggcctagcaacaattgctggttcttcaatgtttatcatgtcaatcttattcatcattatgatgtttgccgcaccagctattaatccttctgctggtttccacagtattgactttaactggaagaatttgatgccaaccttcaacgtaaaatactttacttctctttcaatcctagtatttgccgttggtggttgtgaaaagatctccccttatgttaataaggttaaggatccttccaaaaacttccctaaggctatgatggctttagcaatcatggttatggtatctgctattttaggtacttttgccatggcattaatgtttgaccctaaggtggttaatgccaaccttaacgaatacatctctaatggtgcctacatggcatttgacaagctgggcgaatattaccatgttggcggcttgttcatgtacatctattcatggtgtaacgtaatcggtcaattctcaacattagtaatcagtatcgatgcaccacttagaatgcttttgggtagtaaagaagctaaagaatttattccaaagggcttattaaaactcaacaagcatggtgcttacatcaacggtatctggatggttgttgtcctctctggtggcttaattgctattcaagctttagtaccaaatgctcaagctgttatggcacaattagttaaattaaattcaactactatgccacttcgttacctttgggtatttgcggcatatgttgctttaagaaaacagcagcaaaagttcaacactacttatcaaatgactaaacatcaaggcttagcctatactgccggtatttggtgttttgtagttactgctgcatgttgtatcttgggtatttactcaccagatccatttaccttattccttaatatcttgacgccaatcgtcttgattgcattaggtttaattttgccaggaattaagaaatatcaagaagcaaaggcaaaataaaatttaaatacagaattttaaaaaggaagcaatttcaaaagactgcttcctttttagcaatgtcattaagttaagacattgacaattaagggtgcttttttagagatcgaatcatttggattcgatctctttttttgtataaaataaaggcgaaaagaccagccttttcgcctatcttatatattatatattttaaaccttcaaaattattgccagaaagatggtgttaattatgaaagcccttcataagaatattctagaacgtcttgatcaaattatcaataatactggggatcatattcacgattttattaataatcctcatgcttttaccaggaaacgcactttagatgcagcgacagtccttaaaactacaattaacatgcaaggtcagaatttaaacagtgaactctttagagcttttggcgaagatgcaactaaaaagaacgataaagtagttagtacttctgcctatgttcaacgcaaaagccagctttctcctgcttgttttaaacatattctgactgtttttaatcaaaatctatttaatattcaactttttgatcatcactaccgtttgtttgccattgatggctctgactttaatcaaatctggaatccgaaatcgaataacattgtacaagcttcttctcataaaaagaaaccctattgtcaaattcacgttaatgccttatatgatctattgaataatacctaccaggattgtatttttcagcctaaatcagaaatggatgaacgcaaagcggctgttcaaatgcttaaagctttgaattgtggtccatatattgtaacaatggatcgtggctacactagtttcaatatgattgaaaactgcaatcgcctgcctaactgtcattacataatacgaactaaggctggacaaggcggagttaaagaaataacgacattgcctgatcaagaatgtgatcgtgagatttcctgcctggtaactacttctaactattactacatcacgcataaagccagtgagaatattcaccatgtccagcatcattatcgccaatatattaagtatcgctctaaaaatacccaggatctaagctgggattttggcgagttatgcacaataaaatttcgagcctgcaaatttagaattaatgatgccaaatcaggcaaagaagaatgggaagttgtgctaaccaatcttgatcgaaaaaattatccgctaaaaagaattaaagagctttatcatctgcgttggggtattgagacctccttcaagaaattgaagtattctttaggcagtgtacagttccattccaaacaagataaatttattgaaatggaaatttatgcccatatgattatgtttaatgcaatcagtcaaattgatgcacaggcctatattccgcaaaagcattgcaagtatcaatatgccatcaatttcaagcaatcatgcttgattattcagagcatgtatttggcttcttctttaacgcaagattttgaacggatccttattcagatcagctattataccattccaattagaccaggccgcaaggacaagagaaatattaagcccaaatcagctgtatattatttatatcgcgtagcttaaaaaagcagaatctgtgctatgccttatttgttgtacgaaaaaagcaccaatttaaccaattaaatgttaaatcagtgctttaaaagtctaatattaattgtcaatgtcttaacttaatgacattgcctttttagtgtatatttttatttattagcccaagcatttaccaatgccttgtacttggcaacgctaattcctgcacctttactgcttcctaaatatgaatcagcatttccataaccagtattgcttacattggcaaatcccattactctataatttctgttaatcaaattcaagtagtgtcctgccattttatagccgttcgtgccctctacggccgcatcataagttgccgtccaagttggactatacttcgccggcttcaacgaatgattcttttttacatcataattccaacttttcttttcagagaaccaagtatcaaccggatctaaacccacactttgagtagcgatgttttccaaaccaatcgacttgaaataatgagtatgctttaagccaccacgtttttgatagtcagcatttaacattgaggctgctgtcaaaagtggtgacacctttaatgaccgaaccccttcacttctacgtgctctattgacactattcaaataaggcaatacagctttaatattcttagcactagttgcatcatcatttgaatgcaagtcaacgtattcattgtaccaacttgccttaggctttttacctaagcgacctgttttcaataatttcactgctgatctagcagagcttctttgccctttagtcaaagatttgtttttagatagatatgtcataaaatcaacggcatttttggctgccttaactggcttggaactcaataccgttaaagataaggtcatcatcacagctgatgcacctgcaattaaaaatcgttttttcattctttttctcccatattaatatatgtgaactacgatttaattgtagcacatacactaatggaagattttccttttaaattgcattatccatccatcttaacgtattgtcctttttcatctacaacacctttgaaatggtgcatgctgccatcttcggcctgaaattcacctaagtcaatttccccatagccctttgtagaatcagtaaccttaacatcatcaaaagtttctctgaaaaattgatgaacaattctactcttcaaccgtatatcctttgaatgctcaaaggctgcagacaacgtaaagccctcatctaattgttccttgataaaaacaattagatacaaggtcgctaaattatagcggcgcacaccactttgatcatctgaaatcggcttaatgtagcccttagtttcccaatagcgcaattgcctttgcgaaacaccggtcaatttactaacttcaccgattccaatttctaaattttgaaaaatgtcatgcataatttttttagatttcatcctgataccaccttacagtatagttatattttatatattgttgttatcttttgcaacacttgtattaatttatctaacttatttgtaagattatttgacaatggaaaattttaagcctatagtttttatagttaacttttataagagaaaggaatattacatgaacaagcaaccaacggatattcatggaaaagcttataatcgaaacctactagttttagttttaattataggttctttctgtactgtattaaacggaacactgctttcaacagcgcttccttcaattatgcgttcatttaacatcagcaccgcaactgctgaatgactttcaacagcctttctgttagttaatggtgttatgatcccaatttctgcatggctaatcaatcgcttcggttcaagaaaaatgtatttgtcagccatgtcaatcttctttattggaacagtgatcgccgcaattgcacccaattttggcaccctgcttgctggaagaatcattcagggattaggcgtcggcgttactatgccacttttacaaacaatcatgctttccatcttcccagctaataaacgtggtgcagcaatgggaactgtcgggattgttattggcttagcaccggcaattggaccaacattatctggttggattgttgataacctttcttggcgttatcttttcagcatcattgccccaattgcgggaatagtaattatcttagctttctttttaattaaagatgttttaccaactaagaaagaaaaaattgatgtttggtcagtaacaacctctactctaggcttcggaagtctgttgtatggtttttcagaagctggtaacaaaggctggaccaatcccgagattttaggatttattggatttggaattatatttgtaatcctattcggtatccgccaattgaaaatggatgacccatttttggacattaccgtttttaaacactttgaattttcactggcagctgccttaagtggtatcaccaacttagcgatggtcggcattgaaatggttttaccattatatattcaaaatttgcgtggcgtttctgccttccattcaggtttaatgttactacctggtgcattgatgattggtattatgtcgccaattactggccgtttattcgacaaatatggtgcacgtaaaatggcaattactggtatgactttgttgaccattgggactattccattcgtctttttaactgaacaaagttcatacacgatgattatcattctttacgcaatcagaatggtcggtgtagctttggtaatgatgaatgttactacatctggtatgaattctttaccattaaacaagatttctcacggtactgctgttaacaacactttcagacaggtattaagttcaattggtactgcaattttggtatctgttttaactacaactaccaataataatatgcctggtaaaagtttacttcatgcactgccacttgaatacaagactagagcaatcagtgcaactttagacggttttcatgcttcatttgcaatgagtatcctcttctcattaatcgcattagttctttcattcttcttaaagaagggcaatcgagcacgtgaacatcaagaaaaggtggatggttaaatgatacttttaattctaatcgtagctgcaattatgtttatttactttaatatcatccctggaaaaaggcatacttctattgcatggctatcattaatcgtaacaattctttgtgttgttggcattgtagaacatgattataatcactggggaatgaaaactgaaacaacttcaagcactaatactctagtttccagtgctactcctcgcctgccaattttgctttatcagcctttaggtaatggaactgaaaaagtttacctttataaaactggtcagcttcaaaagaagccaaaatctattaaattacgcgtggtgctagttaaatcgttttagttaataaaaaagtccaatcttgttagactcgacttgtaaatagtaataatagaaaagagtctgatctgattgaactgccttaagcttaagcgttttagccaccatttacaagttagttttaaagatttagtgataatttgtcggcactggtatcgtttgtatgcaccggctgagtttactcatcggcgaaatattgatcaaattaaaactacggacagtctgattttggctttacttatctggcaagctaagacaggaattgaatcacaaagaagattctgtgaatgtttcaattgtttatcacactcacgttttaatcggcgttcacgtcagctattgcaattgatttatcagatacggcaagaaatgaataaaaaggttgacctgaatggacatttcttgatcattgacagctttccggtacctgtttgccaaccaattcgcaactatcgtgctaaaatttttcgcggttatgccaacattggttataaggccaccaagaaaatttacttctatggtttcaaagttcatgccattgttagcgatgacggttacattcttgattatgtcgtaacaaaggcatcagttcatgatgccagggagacagttgaactgatagaaaatacccatccatctaattactatcttcttggcgacgaaggctatttaggcaaagaactgcatcaacagctaaaacaaatgggttacgaactttggacaccatatcgtaaaaatatgacaggagctaaaaagcacaatgatcatcaattgatggctattcgcagaacaattgaaagcgacttttcgcttctgacctattacaatgccgagaacaatcgagcacgtagtctgataggctttcaaagccggttggaaattgcaattttagcttataatttggcttattgtctagaacgatttaactagcaccacgcgtattaaattagataaagtatcgacaaaagtaaaacgaagcagccaaccaaaagtaacgattaagactactcgctacacctatagcaatacctttaatcaaataatgtttggcgtctttggtcatgacaaggagttaaaacacagagaatatattttttctattccctccaactggaaagtaatgtcagttaacgatgccaagcagttgcaaaaacaaatgatgaaaaaacagcagtttttaaaacaaaaatcagcccaataaaataatgaagctcaaactttgatcatgatatgaaccccgaaattcggacatgaatttcggggtttttatttatggctaaattatctaaacatgacaaaattgatatttacaatagctagaaaaattaaattcattttaactcaaattttaccatatgatttaagttaacttaaatcacctttacaaacgcttatgaaatataatttaactaaatctaaatgtagaaaattatttttatcatactgcctatttcaattgcatcctatcattaaagtaatttttataagccaaatagccactaatcacggctccaaggccagtggcagaaagtaacataaatgtaatcataatctgatacttaattgcataaatgggatttacaccagcaaaaattaagccggacatcattcctggcaaatttactaatcctacagttttagccgaatctatcgtaggctgcatcgcagtcttaatgctccttcttaaaattggcatcgatgcagttttaatatcactacccaaagccaacttttctaaaacttgttgatgcagatcattaaagctatcattcaacgctttatagcataagccaactgccaccatttcatttccagcaatcatccccgtaatgggaatgacctgcatagggactggtttaattacgccagaaaaaatcagaattcctaatgtcacgtaagtccctaccgcttcggctattatcgaattccaaatattccgccccggattaggatcacgctgattagcattccaagatgcattaaaaattatcacaatagttgaaaccaaagttagccacaaggcattaacatgaaaaataaacttcaaaacgtagccgattacgactaactgaattatcgccctaatcacgctaattaaaatatccttggttagtcctaatttttctttcgcagaaattccaatggaaactaacaccagtgcaaaagctaatactaacgaccagttgctaactacaacatttttcattcgattattccgcctttttttactcttaaaatattacttgcttcatcaatttcactttgatcatgtgtaacttgaataattgtcacgcctttctcagaaacatccttaatcaaattatgtacaatatctttactttgattatcaagcccggtagttacttcatctaagagcaatatctttggtaaaaatattatgtttcgaattaacgcaactctttgcttttcaccacctgataaagcagtaatctttttatctaaaaaatcagcagagagatcaacttgattaagtaaatcagctatttgcttgtcatttacatctacttttctaatttcatacgggaaaatcaaattatctcttactgtttgcccaaataaagacggctgctgaaaacaatatgaaacttctctacgatattgaactggatttaaggagctaatgtttttttcttgatatagaatatcgcctgaattagcactaattaaatttgcaatcaatcgtaaaatcgtactttttcctgcacctgatgggccaattaaggttagaaaatcgcctttattaaccttaaatgatacatcttgcaatatttgttttttatctgcactatattggatatgttttaattctaatattttcattcttttgcctaactaaataactcatttttctaattatacaactaaaaaaataaaggaaatccaatattttcattgaatttcctttatttaaattaatatcgataatgattacttagtcaacttttgtttactttcaagtaattcagcacgttgagctaagttcatgtataacttgttgttgtaggttgcgataccttcaatttcacgaccagtgtggtattggtaagtatccttaacttcaccatcagttgcaatcttagcaattacgtcattgaatgcaaggtagaagttattgttcttggcatcataagtaaacccttgagtgtatgtgtttgctacaatgccacccttagttgcacctaccatagttggataccagttatcgcctttgcggttgaattcccagtattcagtttggtctttttctttattataaagagttgtgtaaagcttgtgatcatttacaacaacaccattattgaagtaacgaccgtctgaatcactaccgttccagcatttaatagtccaaatcttgttaatgcacatatcgctcttccgaatttggattaactcttcagacatattgctcttgtatgaaaccttattattgttatttagaacgtaaatgtatttatcagttgagcccattgcttgaccgtgaccaattggaatatatggactaactttaatgttcttaacgtaagaattgaacttcttttggctcatatcaagtaagtattgtccgttaaatgcattggttaaatggttaagattatatcctacaatatgaccattgctaatcagggtactacttaataaactagtgtacaaccagccatttgacatggtaattccttcaggaatatgacctacacggttaatatagtcatcatttttaatgtcacggtaaacacttaataaaactggttggaagaagcgagtagtgaaatctaattttccgctttcactatcataagcatgcttattcttatcaggagtaaaatcagtcttagttacatagttagcagaactgccgtagtaagtcttccaggatttcaaatcgccgttaaatggcttagcttggacgctatcagcatcagcaattccttccttagtactctttctgacagttaccttaacagttgcctttgctttaccatagctatatttaacattataggtacctggagttgagcaatcgattgcatcttctgaaatcttaatatctgctgtatcaattacagtacccatataattggttacataacttactgcatcagttggatcaaaatcgtagtgactattttgtactaaactgatagtctttggtacagcgatagcatctcttgtaaagtagttttggttaacataaccaactttacgaccatttacataaatacgccaataagttgcatcctttgtcttaattctctggtcagattgaatatgagcatattgataatcgctagcatcagcaatcttaccactaggtttaccattactaatctttttataaacaggataattcttattgctacctactttaaccattaagtcataagaagtacttgtttgagctggtcccttcttcgcactggaatcagtcttagcagtatctgtattactatcagtagttttagaattatctgcaaatactgcatttgtagaaccaattaacaaaccaacacccagtgctacagctgaagtagcagttaaaattttatttgaatacttcaaacctatcctccgtatcttatattttgcattttacttttatattataatatataaacactgttagctaaaatacatttttattaccattgttaccattgagcttctttatttgacactttcattacgaagtgatttaattagcactgtacttgaaagagtgctaattaatacgaaatcaattaggaggcaaatttatgctagtacctacagttattgaacaaactgctcgtggtgaacgtgcttatgacatttactcacgcttattaaaagacagaattatcatgcttagcggtgaaattaatgaccaaatggctaactcaatcatcgctcaattactcttccttgatgctcaagacaataccaaggatatttcactttatatcaactcaccaggtggtgtaatcacctccggcttagctatcatggataccatgaactttattaagtcagacgtatcaactattgcaattggtatggcagcttcaatggcttctatccttttgactagtggtaccaagggtaagcgtttcgcacttcctaactcaactgttttaattcaccaaccattaggtggtgctcaaggtcaacaaactgatatccaaattgcagctaacgaaattttgaagagccgtaagaagatcaacgaaattttgcacgaaactaccggtcaacctttggaaaagatccaaaaggatactgaacgtgacaactacttaactgctgaagaagccaaggaatatggtttgattgacgaaatcatggttaataagaagaagtaattaattattaaaaattattcacactctaaaaggagcttgcactcattgtgcaggctcctttttcttattctcttaaactctcagctaactcatgtagtttcttaaatcggtgattaactcctgacttcgaaatcggaccatccggaatttgattagctacttcctttaaagttaattctggatgcgccaatctaaaacgcgctaaaacttgcaatttctctggtagatcatctaagccgttttcttgttcaatcagctggatgtcttctacctgcttagctgaagctgaggctgtttttttcatattcgcggtatcacaattaaccaagcgattaaccgaatttcgcatatctcgcataatacgcaaatcttcaaagttaagcattgcattaagtgcacccactatatgcaaaaagtcgccaatttttgcggcttcttttaaataaacaatatagcctcttctacgtttagttgctttagcatttaaataaaaataattattcatcaacttacataaatcctcattatggtcctcataagttgaataaatctccaagtgataacgactcgtttctggattattgacactacctccggctagaaatgcaccgcgtaaataggacattgctccttcacgtgaagtcataattctctgcggaattcgcgttaccaaacctttttcaggatcccagatttgtaagttttctaggatttcttgtaccttctgattcaatcgtaccaaatattgattattttttttcaatttcatcttgcgcgagacaatcagcaatggctcaataccataagcaatcttaatcagcttaaaaattcgtcgagcaatcgcaggattttctgtagttatatctaggctaaattgatgatcgtgcaagtttaatacaccattcattcgcaaaaaagcagctaactctgctttggcatgctctggatgcacctcaagcgaagttagctcctttttgacttcactagcataactagccatcattttccttcattcttttacgtgacattgattcaaatgccagattaataatttcttttcctaccttttcaccatcatgaaataccaatccatgacgttgatcgataaagtcatcagtaatgacacggcagttttgctttcttaagccttcaaagtcattcttaacaggctcaagataagcatcataatcttctgggtgaaatttgctcatatcaattttggcaccattaaccagagcggtattgatataatttccacctaagtgatcgttaattacctgtacgtgttccgcatcactaaagtgatctgtctcaccacgctgagtcatgatattgcaaatataaataacctcggcgtcagtctcacgcactgcttcacctaaattagagatcattaagttaggtaaaattgaagtaaataaactacctggcccaagtacgactgcatcagcttgcataatcgaagccagtactggtaaaacagctctaggctcttcatccgaatcagtatcggtcacccagacacgcttaatccgcttatctttagatgtgatttcagtttcaccagactccgtagttccatccacgaattctgcgtttaaagtcaatggttcattggatgctggaaaaacatgaccatcaattttcatcatttttgacaaagattgaactgcatcaaagatattgccatgcatttcattcaatgccgcaataattaaattaccgattgcatgtcctgaaaaaaaggaatcggatgaatcaaatcgatactgaaaaatattcttttcttcctgaggtaagtcactaagtgataccaaaacattacggatatcaccaggtggaactacgttaataaagttacggattgaaccagatgaaccgccgtcatctgaaaccgttacgattgcagtaatttccgcgttttgatcttttaaggcattcaaaataactggtaaacccgtaccgccaccaattacgactacacggggacgtctgcctttaatcacgcgaacaatccttgtttctccatatggcacaggtgcgcacctactttctaatataacgactcacttcacggtgagtaatatcgactggatattttttagctaaatctcgtgccaactgttgggcaattgaaacactccggtgttgacccccagtacaaccaattgcaatggtcaacttttccttcccctctttgatatatccagggatagctgtttcaagcaaatcaagcaattttttataaaagacctgtgtttcttctttgttcatcacatagtcaaatacacgcttgtccagtcccgtaaatggtcttaattctgaaatataaaatgggttaggcaaaaaacgcacatccattacaatatctgcatcaattggcatcccatacttaaagccaaatgacatcacttcaattgaaaatggctgccgcttgcgatcactaaatgtattgattaatttttgctttaattccttagtcgacaagtttgacgtatcgataatataatttgatctatttttaattggcattaaaatacgacgttcttcttgaatgccatcaagcaagcgacctttgccattattggctaaaggcggaagacgccttgtttctttataacgagcaaccaagacatcatcggaagcatccaaaaataggatagtagcttgcacattgccattatcttcaagtgaattaacttcatccaataaatcgcgataaaatgtcttaactcgtaaatcaattactacggctaccttatgaaagtcattggaattattaattaaatcccaaaaactacctaataaagttggaggaagattatcgactacaaagtagcccatatcttctaagtcatgagcgaccacagttttacctgctccgctcatgcctgtgactattaataattgttttttctcatcagccatactgaaatcctcctctttacaaattatatcataccgggtgtgtcataattgtgcaaaaaaaagaagcctttcggcttaaatttttatcaaatattaacggtgcataaatgcaaccacaatttcattaatgccaaagactaataaccagaatgcaactaaccatactaagcttaaggctgcgattactggattaataattaagaagaaggcaataatcaaacttaaaatattcaaaatcaagttaaatacaaagtatccggttgaaaatgcacgtaagtgccatgaccaagcaatacctacaactgaatcaacaaagaaccagattgcaaataagtaagcgatagtcaaaccaccaatatcatatgagcaaatgaacaagataccgataatgatatctaatacacctgacacaattgctacccaactacgtgagaaaaattcacgaaagcgtgagtaagcagccaaccatacaataccttgaacgattgatacaatagcaaaaatcaagacaaatgcatgcaaccctttagctgggtgacgtaataacacgaacgcaactacgaccattaagataccggcaataaatgcgccccagtcaaagccgtgattatctctagaactagaaaaaatatccatttttattcctccttgcagactattttacacttattcaaggttaataaaaactattggctattgtcttctagcctatttttttgcttcttttgttagtttagtatcacgttctaagactggtttcaaatactgaccagtatagctttctttaactttcgctacttcttctggcgtaccggtagccacaatttgaccgccacgttcccctccttcaggacctaagtcgatcagccaatctgcatttttaattacatcaagattatgctcaataattaaaaccgtattgccttcatctaccaaccgctgcaaaacttctaataaacgcttgatatcatcggtatgcaaaccggtagttggttcatcaagaatatagaaatttttaccagtagaaagcttttgcaattcagcagctaatttcattctttgagcttcaccaccagataaagttgtagcggattgacctaatttcacatagcccaaacctacatcaacgatagtctggagtttacgctgaatcttaggaatattttcgaaaaacttagttgcttcattaatcgtcatatcaagcacttgagcaatattctttccccgataagttacttccaatgtttcagaattataacgagtgccgtgacaaacctcacatggtacatatacatcaggcaaaaagttcatttcaatcttgataattccatcaccatgacaggcttcacaacgtccacctttgacgttgaacgaaaatcttgctttagtataaccacgcaattttgcttcattagtttgagcaaataaggttctgatatcatcaaaaacactagtataagttgcaggattactacgtggtgttctaccaatagggctttgatcgatatcgatgattttttcaatattcttgtaacccttgattgacttatacttacctggcttagttgaattattgtttaatttttgggctaaagcgcgtttcaagatcatattaaccaaagtagatttaccagaacctgagacaccactgaccacaataaatttgcccaacggaaaatcaacattaatattctttaaattattttcttgagctccagtaattgtaatctttttaccattgcctttacgacgcttcaatggaaccggcacaaattttttaccagacaaatattgccccgttaaagaatcaggattctgctctacttctttaggagttccttgtgccataactttaccaccgtaaacaccggcaccaggtcccatatcaaccaaatagtcagcttgccgcattgtttcgtcatcgtgctctaccacaattaaagaattgcctaaatcacgcattctctttaaagaagcaatcagccgatcattatcacgttgatgcaaaccgatagatggttcatccaaaacatacataactcccgataagtttgagccaatttgagttgccaaccgaatacgctgagcttcaccaccagacaaggtattagctgatcgagaaagagttaaataatctaatcctacactatccaagaatgaaagacgatcgcgtacttcctttaaaatcggcttagcaatcatagtctcttgctcgcttaatttgacgtccttaaagaaatcaagtgctttatcaatagaaagctccgaagcttccgcgatatccttgcccatgactttcactgctaatgctttttcattcaaacgcttgccgtgacaagttgaacaagtaagttcagtcatatatttgcccatcacatcacgcataaacttggacattggtcgtttataacgccgctcaacattggccattactccttcaaatggttgaacggtatcattaacgccaaagtcaccagttacatggaatttcaccggcttagttgagccatgcagaataatgtcgcgttgacgtttagttagtttattaaaaggcttatccatcggaatttttaatgccgtgcaagcttgttccaacatttcagtatagtaattggaagtcttccatggagccagtgcaccttcagctaaagattttgttttgtccggaacaaccaaatcttcgtctactgctaacttcatccctaacccatcacaatcaaggcaggcaccaaatggtgcattaaaggagaacagtcttggttccatttcacccacagtaaagccacactttggacaagcataatactcagaaaagttaagcatttcaccaccaattacatcaacattcatgtagccatctgacaaacgaagtgcagcttcaatagaatcaaataagcgagacttaatgctatccttaacaatcaaacggtcaacgacaatatcgattgagtgacgcttgttcttagctaattcaaaatcctcaccaatttcgtgcatctcaccatcaacaattacacgaacatatcctgcacgttgcactcgcttaaatacttccttgtgttctccacgcttagcacgaataactggcgctaaaatttgaattttcgttctttctggtaaagccatcactcggtcaaccatctgatcaactgattgtcgttgaatcagcgtcccatcattaggacaaattggatggcctactctggcccaaagcaaacgtaaataatcattaatctcagtgacggtcccaactgttgaccgtggattatgtgacgttgttttttgatcaattgaaattgctggatttaaaccatcaattgaatccacatctggtttatccatttgccccaaaaactgtctagcataactagaaagtgattgcacataacgtctacgcccttctgcataaagcgtatcaaaggctaaagaacttttacctgaaccagataagccagtaataactactaacttatccttaggaatagttaaattaatgtcttttaaattatgttcacgtgctccgcgaataacgatcttatcatttgccattaaaattctttccttttcttgatgatttttgcaattccataattgcatcccgcaagttagcagcttcttcaaagtcaagcttcttagctgcttcttgcatttgctcttgcaagttgctaatcattgtcttcttttgcttagccgtcaattcatcaaaattaagatctgcaaaactatcagatttttcttctttttcactcgacggtttagtaatcgaaattacgtcttgaatcggcttaatgattgtcttaggcgttatgccatgctctttgttaaattccatctgaattttacgccgacgcttggtagctttaatcgctgctctcatggaatcagtaatcgtatcagcatacatgattacttcaccattggcattacgggcggtccgtcccatagtctgaaccagcggccgatatgctctcaagaagccttccttatctgcatccagaattgctaccagtgaaacttccggtacatcgattccttcccgcaacaggttaattccaattaagacatcgaacttacctaaccgtaagtcacgcaaaatttgcattctttccagcgtcttaatatcagagtgcaaataacgtactttaattcctaagtccttcaaataatcggttaagtcttccgccatttttttggtcaaagtagtaacaaagactcgttcatgacggtcaatccgtttattaatttcgccaactaaatcatcaatttgaccctcaattggccttacttcaatcttgggatcaagcaatccggttggtcgaataatttgttcaaccttatgatctgttcgttcaagttcataatcacctggggtagctgagacatacaaaatttgattaacatgcttttcaaattcggatagctttaatggacggttatcaagtgcagatggcaaacggaaaccatagtcaatcaaggtttgcttacgattacggtcaccattgtacattgctctaatttcaggcatagtagcatgtgattcgtcaattaaaattaagaaatcatctgggaagaagtccaacaaagtatacggtggctctcctgcttttcgtccttccatatgccttgaatagttttcgattccgttggtatagccaacttcacccatcatttccatatcataggtagtacgttgcttgattctttcagcttcaagcaatttgccttcgccttcgaactttttaacctgcaatttcatctctttagaaattgctcccaaagctcgccgcaattgctcgtcattggtcataaagtgcgtagctgggaaaagcgaaatactctcacgctcaccgatcacctcaccggttaacgaatcaacttcaacaatgcgatcaatttcatcaccaaagaattcaattcgataagcatgattagaattgccggctggaaagacctcaactacatccccgcggacccgaaaacgaccgcgttgaaagtcaatatcattacgatcatattgaatatttaccaaatcacgcaacaaggtattacggtcatattcttcgccttcatggatcatcaagacactgcgcgcatactctttaggatcacccaaaccatagatacaagaaaccgaagcaacaactactacgtcattacgctccattaaagctgaggtagtagcatgccgcaactgatcaatttcatcattgattgccgaatccttttcaatataagtgtctgattgtggaacgtaagcttctggctgataataatcatagtatgaaacaaaatattcaactgcattattaggaaagaaacttttaaactcaccatatagctgccctaccaaggtcttattatgcgtaataactaatgtaggcttattcagcttagcaataatattggccatggtgaaagttttcccagtaccagttgcaccttccagaatctgttctttatatccttttttaaatccagcagtcagtttatcaatagcttgctcttgatcaccggctggtttaaactttgatactaattcaaatttgcgatttttttgtcgtttaatcataaaaaactcctcaagaaaaaagttggacaagcatagtccaactttttaattagtatctatattttactaccgcgaacgtgctttcgcacgaaaaatgcttaattatttaagtaaatctgctaaagccttttgataatcttcagctgccttttctgcagtggcaatgtcttttttgtttacaccaacataggccttaattactggttcagtacctgatgggcgaagtgctacccaggtttcatcatctaagaagtacttcaacacattagattctgggaacccttctaatggtgtctttttgccattttcaatagtttctttttgcaagaaatcttgaatcttaagcactttactaccgccgatttcagttaagtgctcattacgcaacttgctcattaattcggccatcttcttttgaccaccaatacctggcatttcaattgcacgggtaatttcataagcaacgccatacttttgccaaatttcttgcaaaccatcaaagacagtcatcccacgtgaagcatagtatgaagcaacttcggcaaacatcaatgcaccctgcatggcatccttatcacgagcaaatggtttaaacaaatagccatagctttcttcaaagcccatcaagaacttagcatcaccagctttattcatccggtcaacttcttcaccaatgtacttaaagcccgtcaaaacatgcttagtcttaataccaaagtcctctgcaatcttaaatggcaaagcactagaaacaactgaagtaacgatctcataatcagggggtaattgaccattttccttcatatgagccaataggtagtaagccatcaaagtagcaatttggttaccagtcaaaacttggaaatcaccatcagtttttctaactgctgcacccattctatcagcatccgggtcagtagcaataatgacattagcatttacctcatttgccaacttaaaaccaggttcaaaaacatcacggtattctggattaggcttaattgtggttggaaattctggatcaatgattgattgacttggcacaggaatcacattatcaaagccgccttgtctgaaagcacgatcataaagcatcttgcctgtaccatgaagtggagtataaatgatctttaacttgtcagcgttggccttaaccatctctggatcaacagttacttgcttcaattcattcaagtaatcttcatcaacatcttcacctattaactgcaaggtgccattagcacgcaattcttttactggtgcagccttgacagcaaaaatatcagttactttttgagcataagcaaaaagtcgatctgcattatctggtgccatttgtgcaccatcttcaccgtaaactttatagccattgtattgcttagcattgtgtgaagcagtgatattaattccagcgaaagtatgcaaatgacgtactgcatatgaaagttctggtgtcggtcttaaatcatcaaataagtaaacatgaattccgtgtgcacctaaaactctggcagcatgttctgcaaactctcttgagtgatatcttgaatcaaaggaaatagctaccccacgctttttagcatcagcaccattttcttcaattaaacgagctaagccttcagttactcgacctacagtaaacaagttaatccggttggtaccgggttcaagacgaccacgcatccccgcagtaccaaaattaatatcctgtccaaaggcatcttcgatccatttttcatccttgcccaaagtatttaattgatcttttaaataatctggtaaattagtagctttttgccattctgtataaatttctttagcgtccatcaatgtcctctattcattaaaagttggatttctaaagcgctttcaaactgttaacaattttctattatctgctattaattataaaacttattagtcattaatttaagctttagacaaaaaaagacatgtccaatacgaacatgtcttaatgaaaaaacgaataaatttaatttttcttgtcttgtaagtcttggtagtaattatatgcagcttgaccagctacactaccttcaccaactgcattagcaatttggcgtaaatctttttgacgaacatcacctaaagcaaagataccaggcaccttagtttccatatgatcatcagttacaatccaaccatggtcatccaagataccaagatccttaaaaggttcagtttgtggtaaaacacccacgtaaataaagacaccagcaactggaatttctttttcggcaccagtttccttatcgcggtacttaacccctgtgactttcatgtcatcgcctaagatttcttcagtttgtgcattccaaatgaaatgcatcttcttgtttgcaaatgcacgcttttgcaaagttggttgtgctcgcaattgatcacggcggtgaataactgtaacgctcttagctaattgtgaaagataaattccttcttcaattgctgaatcaccaccaccgatgacagctacatcttcatctttaaagaaagcggcatcgcagacggcacaatatgaaacacctttgcctgaatattcttcttctccaggcacattcaaatgcttatgatctgaacctgtagcaataattacgatcggtgcacgatactcattgccatcatcagttttaactaacttatcctcgccatcgagttcaacactttgtacgttgccatacttataatctggttcaaacttcatcattgtgtcgtacatcttttgactaagttctggacctttgatttcagaaaaaccaggataattgtcgatagcatcagtattgttcatttgaccgccatagggaccgcgatcaagaacaagaatctttaagttagcacgcgcagcatataagccagcagtcatcccaccaggacctgcaccaataataattacgtcgtatttatcagccataatctatccttctttctacttacttttgataagcaaataatacaatagatttaacttcttgccaactattttgcttatcttttataaacgaatttcaggctttggttctctacccatcattttcttaatttctgtatcaacatcagcatcttcataaagaacacggtagattgcctctgaaattggcatatcaatgcccttttcttcacataattcgtgaacagctttaacagtagtagcgccttcgacaacttgtcccatatttttcaaaacgtaatctaaagtcttgccttcgccgatttgtttaccagcacgccaattacgtgagtttactgaagtacaagttacaattaagtcaccaatacctgacaagcctgagaaggtcattggcttagcaccaaagtattgcacacccaaacgagtgatttctgctaaacctctagtcatcaaggcagctttggcgtcatcaccatatccttggcctactaaaatacctgcagcaatcgcaattacgttcttaacggcaccaccaacttctacacctactaaatcatcgttagtgtagaaacgaacgtagtcattggagaacaattcttgtacccgcttagcattttcttcattagttgatgcacatgcaatcgcggttaaatctttttgagcaacattttctgcgtgactaggacctgaaattgcaacaatcttatcttcatcatctggataaatttcttcagttaaaatttcagaaataagcttcttactgcctggttcaatccctttagttgcagtaactaacagtggcttagcacccgtcttatctaaaaccttgcgtacgtttttagcaacgattctaactgccttagttggcaaaacaaataaaacaagttctgccccatcaagagctgcttccaaatcaccagtagccttggtattctcatttaatttccaatccttcatatagtggctattggtgtggtgagcgttaatttcttcattaacactatcaatgttaccgtaaagagttacatcgttaccattatcggctaacattgaacccaatactgaaccccatgaaccattacctaaaactgcaatctttgtcattttttctctcaaactttctaattaaaatcttttattaattctaatctcttgaatacgggtattttaatccactaccatccaaataccattttggattaacgactttccgccgataaatccataaaataattgtagcaataaagaggattaaacttaatgcctgtgatactcgtattataccaaaaatatacagactatctgtcctcattccttcaacgaagaaccttactacactataccaaagaagataggtcatgaaaacttctccctgcttgaagagatgttttttatgacgcaaggatagaattaagattaagccaatcaaattaaaaaatgattcgtacaaaaaagttggttgataatacgtcccgcctattttcatttgctcaataataaattgtggtaagtgtaagctttgtaaaaaatgaagagtagttggtgcgccgtgcgcctcttgattaacaaaattaccccagcgtccccaaatctgagctgccatgactccaggagcaatgatatccagcattaaaaatggaggtagcattcgtttataacagaaaatcaacagcacaattaagccggcaattaaaccaccataaatcgcaatcccaccattccaaatcgcaataatttgctcgggatgctgtgaataataaccccattcaaaaatcacataataaatacgtgcgccaacataccctaacggtactgcccacaatagcaaatcgacaaaatcatctggaataatttgacgtttttttccttcgttaatcgccatccagcaagctaacataatggctactgccataatgatgccataccatttgacacttaaattccctaaatgaaaggccaccggattaattactaaattagtcattatgcggcaccttattcgtatcttcttttgagtgctctgaaatcagactagtcaaattattatcaaaagtttgagttgcatcatagcccatcttcttagctctgaagttcatcgctgcaacttcaataataatttcaatattgcgtccaaccttaactggaatattaacctgtggaattggtacattgcagatttcacgcgtattttcttgaaaacctaggcgatcataattagcttttggatcccaattaaccaaattaattaccagttggatttctgttctattttttacggcaccggcaccaaataaattcatcacatcaataatgccaattcctctgatctccattaagtgctttaagatctttggtgcttcacccacaacggtattatggtctttttgaaaagcatctactcgatcatccgcaattaatctgtgtcctctttgaactaatcccaaagcagtttcagacttaccaacaccagatgcaccagttaacagcacacccatccctttgatttcaaccaaaacaccatgaatgctggttcttttggctaaacgagcacgcaagtattcagttaaaatactggatatgtaggtagttgactctcttgtacgcaaaattgggattttgtgttcctctgctgccgtagttaattcttccggtacaggcaaagagcgagaaatcaaaaaacacggtgtagccttagtacacattttgttaaagacatgcattctaatatcatggtccaagcgtgccgcatatgaaatttctgtccgacccaataattgaattcgttgcgcaggataaaaatcaaaataaccagttaattctaatccagggcgataaatatcagaaacataaatttcttcatctttgatatattcctgtccttggtaaacttcaaggatactctgattgtcctggatcaatttgcttaatctaacttcatcagccatattaggcctcctaactatttatcaatatctttagtggtgacatttctagctttttttcttggtctaggaccagaagtactagtagccttaaaccactcacgataacttccactacttggcatattatcttgatttttccttccagtaaaccgataaataagccaaatgattaaaatcgcaattacagctactggtaaaagtaaaataaatgccttaaatagaacaaacaataaacttaaaataattagcgctactaaaacaagcgttacaatttccattaaactcattttttaacctaatctggattctcttgactaagcaaccactgtaaataggaataaataaacggttgcaattttccgtccattactccttgagcgtcagctgtttcatgacctgtccgcaaatctttcactaggttgtaaggatggaaaacatatgacctaatttgtgatccccagccaatctccttttgatcgcctttcagagcctgcttttgcttacgctttttttcttcttctaagtgaaaaagctttgctcttaattcattcatcgcagtttcacggttttgcaattgtgaacgctgtgcctgagacgtagtcacaattcctgttggtaagtgcgtaattctaacggcactagaagttttattaatatgctgcccaccagcaccactagagcggtaaacatcaacccgtaaatccttaggatcaatatcaatttgaatactgtcatcaacttctggaatcacttctacagaagcaaatgatgtatgccgtcttttagccgcatcaaatggcgaaattctaaccaaacgatggacaccattttctgatttaagcattccgtaagcatttttacctacaattcgcgcactaacgctcttcaacccagcttcttcaccaggctcataatcgttgatttcaaatttaaaaccagctgtatcacaataacgttgatacattcttagaagcatctgtccccagtccatcgcttctgtaccgccagcaccagggtgaatttccatcaaagcattatggctatcatacttacccgacaagagcaggtctaactcataattatgaaaatcttcttgcagcgtagctagatccgcttcaacttctttttgcaagtcaggatctggttcttcacgcaaaagttcaaccgcagtagtttcgtcttcgtagctagtttgcaattttaaaaatgaatcacgtttttcctttaatcggttggtttcactaattaatttttgcgctttttcctggttattccaaaaatcaggctgcgccatcttgttttcattaatttcgatgctttcatcaatcgcatctaagtcaaagagaccccctaaagtgatttagacgtttttttagttcatctaacacactttgaatttcactaatttccatttttacctaccatcttttattttattgcaaaaaaagggaagctcttaactcccctttttctttattaacgactaagattttgtctaatttcagccttcatgaacaaacgagttacatcaaattcaatatttgaaatcatttcttcaaacattctgtaaccagaatcttgatattcaactaatgggttcaattgaccgtatccacgaagaccaattgattgacgcaactgatccattgcatcaatatgatcagtccaacgatcatcaaccacacgcaagataactaccttttcaaattcaagcatttggctaggatcgcctaaggccttttccttatcttcgaagttttgctcaacaatgtcataaagcttcttcttcaaatcttcaacactaatagtcttgaagtcaattgagtcagttaccttgtctgaagtcaaacttgaggaaatgaaatcgcgtaatgagtcaagacgccattccttgcgttcaccttgagtaaacattgctacttggtgatcaattgttctgtgaatcattggaattaaaacattcttcaatgacttatcagcttcaatgacctgcattctttcgccgtagataatttcacgttgaatacgcataacatcatcgtattgcaaagtttgcttacgagtatcatagttattaccttcaacacgtttttgagcagattcaacttggcgagtaatcaagcgactttcgataaccttatcatcatcattatctgataaacgatccaagaagtccttaactcgatcaccaccaaaacgcttcatcaaatcatcttcaagcgacaagtagaatctggtgtaacctgggtcaccctgacgaccagaacgaccacgaagctggttatcaatacgacgtgattcgtgacgttcagtaccaataactgccagtccaccaagttctttaacaccaggcccaagcttaatatcagtaccacgaccggccatgttagtagcgatagttacggcaccacgttgaccagcgttcatgatgatttgagcttccttagcgtggttcttagcgttcaaaactgcgtgaggaatacctgctttatcaagcatcttactcaaacgttctgaactttcaatggcaacagtaccaaccaaaacaggttgaccattagcgtgacgcttcttaatttcttcaactacagcgtggaacttagagtccaaagttggatacaaaatgtctggcatgtcttttctggcaattggacggttagtaggaatcgtgattacctgcatgttgtaaatttcacggaattcttcctcttcagtcttagcagtaccagtcatacctgacaacttcttgtacattctgaagaagttctggtaggtaatagtagcttgcgttcttgattcttcttgaatcttaacgccttccttagcttcaatagcttggtgcaagccatctgagtaacgacggccttccattacacgaccagtgaatgagtcaacgatcaaaacttcgccatcttgaacaacgtagtcgatatccttaagcatgatgtagttggcacgaagagcttggtcaatgtggtgaaccaacttttggttttcaacatcgtacaagttctttaggccaaagtgttgacaagccttttcaataccagttctggtaagtgaaatagtcttagttggccagtcaatcttgtaatcgccgtgatcttcatcatcgtcggcatcatcatcgctcttgtcttcagtcaaagtcttaacaaagcggtcagcacggatgtaatcactgtttgcttgttcagcttcaccagaaataatcaaaggagttctagcttcatcgattaagatagagtcaacttcgtcgatgatagcgtagttcaatggacgttgtaccatttgttccttgtaaacaaccatgttgtcacgcaaatagtcaaagccaagttctgagttagttgagtaagtaacatcacagttgtaagctgcacgcttttcgtctggtgacattgagttcaagttcaaaccaacagttaagccaagccacttgtaaagttgacccatttcttcttcgtcacgacttgaaaggtattcgttaacagtaacaacgtgtacacccttgccttcaagtgcgttcaagtatactggcatggttgctgtcaaagtcttaccttcaccagtcatcatttcggcgatgttaccgtagtgaagtgcaataccacccaaaatttgtacgtggaatgggtaaagtcctaatacacgcttagcaccttcacgagcaactgcgaatgcttctggtaaaagatcatccaaactttcgcccttctttaaacggtcacgaaattctggtgtctttgcttgcaattgttcatcagatagcttgctcatttcatctgcatgagcttctaccttagctgcgattttttcaaatttcttaagttctcttttatcgtcgttatatagtttctttaaaatatttaccattaaatcggtccttatatgtcgtaaagtctaaaaatacagaataattttaacatgtttatcagcaaaataaaaatattctaaacaaaaaaccccacgctcaaacaaacgcgaggttttgaattaacgagtattttaactcaattattcgttagtttcaattaagccgtaacgaccatcgtttctacggtaaacaacgctagtgccgttagtttctgcatcttcaaaaacgaagaagtcatgttccaacatgtccatttgtaaaatagcttcttctggatccattggctttaagcttacacgcttgttacgaacaatatcaaattcgctaggcttcttttcttcttcttcaggttgttctacaaagaaatcttgtaatcccttttcacgactctttctatttacacgagtcttgtactttctaatttgacgttcgagtttttcagaaacgaagtcaatgctacgatacatatcatccgtggtttcttcggctctcaaaactaagtatggtaaaggaatagtaacttcaactttagctgagtgatcacggtatactctcaagtttacgtgtgcaatcacatcttgattcaattcgaagtacttctctaacttgtttaaccgcttttctacataacttctcaaagcatcagttacttcaatattttctccacgaacattgtactttaacatataagattctcctttcaccgctatgcggtttttctttacaaatttattataccaaaaaatgtaagcgtttcataacaaatctaatgacaaattgaaaagctttcaattttcatttcgggaaaaccctgctgtaaacggtcccgcgcgtgatatagcgtgcgcccggtcgtgtaaatatcatccaaaattaatacttttcctgaaactatattttccttgattttaatatttttatcaatcaaaaagctttgaggcgttttaagccgctcctctttgtttttctcaccttgggcatgactacccgattgtttaatcagaagcggtgtcagcggcaaaatatcagcataaatagcaaaaattgtatcaaactgtcgtcttgattgatgttcaggtgaagtgggcacgggcacataaaagtcatagttagttttacacaaatagtcataacacaaatcttgcaatacttcccgcaaaacataatctccacgccgcttatacgcaaccatcaagtcatgaaaagcagaattataacgatataaagcatgattatgcagaatattttcgccataaatggcttgccaatttcgacaatcgctacacataaagccttgacctagttccttatcacagccagagcagcgattgtctgctaacttttcaaattgttttaaacattgcaagcaaattttactttttcgcgctgttttaaaagaaaaaagttgtgcaaattgtaccggtggagtaaactcctgctcacataataaacaagttctcatctattcatccccttgatctgcttaatactctgtcgaatattcttggtataacgatgataacaatacaaaactaagcccgtttggtcatcgtgagcccgaccaactcgacctgcaatttgcaccaaactagcagcggtataaattgcatcatctgctgcaataataattacccaaacatttttaaaagttacaccacgctctaaaattgtggttgtcaacaataagtcatatttacgatcacgaaaagcctgtactttttctaatcgttgcggatcttgtgcatgaacaccggccaatttaattttattttgcaactttttccgcaaagcttcttgataaagcggaatttcttcaatccgtggtacaaacaaaagcaaaggatgaccactttgaatgacttttttaatctcctgcattaatttaggatgaatttgtcccttccgcaaaaacggcctgataaaaagcctttctcttggtacaggcaataatccaccatgaaaacgccgatttaagcgcaaaatttctaacttccctgttttagcttccaaaagcaaatcgttcgttggcgttgcggttaaatacattcgagtcccagttgttttaaccgcatttttggccgcaaaatgtagttgcggattacctacataaggaaaagagtctacctcatcaattaccaataaatcaaaggcacgataaaacttcattaattggtgtgtagtacaaattgtcaactgctctagccctatttccttaaattcacggccatgatacttaccgatctcaacttgggcaaacgctgccgaaaatcttggaaacagctcatttaccacatcaattcttggtgtagcaatacaagcgcgctgtccttttttcatacatcgagcaatcaactgaaacaacatctcagttttacccgccccagttacagcatgaaccaatgtattttttctttgttcaaaattttgtactaatttatccgaaatattctgctgcaatggggttagtttaccttgccagcttaatcccccgtttttaacatgagaaaaagtattattactgtcttttctaataagccaatcgccctcatttgcacgtcccaagccaatacaaccacgacaataatatttaccattaggcagtcgactattaacttggctgccacagcgattgcatttacctttttcaattactggaattttgcggcatccctcaaatgtgctagaatcctcttgactaacaatccattgacgacctgataatagagtcaaatcttccatatttttacctccctattatctattacgcaaaaagaggcgattattttgtcagaaaaggaaaattttttaactattaaagaaaacggcaccggtgaattaattatcaaaaagagcagattcattgccaatattgcccgcaccactactactgatgcggcaaatgattttattcaaaaaatctctaaaaaatatcgcgatgcttcgcacaatacctttgcctacacgatcggcttaaatgacgaccaggtcaaagaaagcgataatggtgagccatcaggtacggctggtgttcctgaattaaaagcattgcaattaatgaatttaaaaaacgttacagtcgtagtaacccgttattttggtggaatcaaattaggagcaggcggtttaattcgtgcctattccaatagtgtcaccaatgttgttgaaaaagtcggcgtcattaaacgcgttttacaacaagaattaatttttagcgtaccctataaccgcttcgatgaagttgatcattacctaaaacagcaaaaaatttttattgccaataccgaatacggtgtggatgttaaaattcatatttttgttaacgatgaccaacaagctaaacctaaggaagacctaactaatttattggccggacaggttacctttactaatggtgaaaaacgctataatgaaattcctgttgaagctaataattatcatgaacaataaaaagagcatttggatatttccaaatgcttttttgctacttattattttttttactcttcaattgatctggtttttcgtctcctaagtgccaaacttcaattgttggatcagttttactcttttgattaataattttctgaattacatgcatcaaaggatggtatttttcacccaataaaccaattgattccacaaaatactctaaggcaatcagcaagcctaagatcagaagccaagtgccccaagttggcgaaagcaggaataataaagaaataaatgagaaaaccaatgataatgcgtaaatagtcaataccgtctgtcggtgcgttaaccccattcgcatcagctggtgatgtaaatgatgcttgtctgcttctgaaattggctttttgtttagctttctccgaatcattgcataaacggtgtcagtaataggcactcccaaaatgataattgggaccaacaatgaaataaaagttacattctttaaccccttcagagataaaacggcgatcataaaaccaatataaagtgcacccgtatcacccaagaaaatttttgctggatggaaattatatggtaaaaagcccaataaacaggcagctaacataaaacaagcaattgggacatatagctgatgagtgtgcaagaagaaataacctacgatccccatggtagtcagagagatcattgaaaccccatcagctagcccatcaagtccatcaatcaagttaactgcattagttaaagctaagatccaaaaaatagtaattgggaaactccaccaacctagatttacttcatgtgcgatgaatggcacctttaacacattcattctgattccagctaaaaagtagataatcaatgaagcgataaaaatcccaaacattttttgtctaggttttaactccaaaatatcgtcgatcaatcccgtcaaaacaattacgcttgaagcgagtaaaatcgaaaaaatttcatgagtcggaaattgctcacgcaacagaacaaaagtaccgatattaaaagtaacaaaaatccccagtccaccaatcgttggcattggtttcttattaactcgccgggcattaggattatcaacagctcctaagacaaaggcaagccgtcgaataaacggtgtaattgccgctgaaataattactaataagaataattcaacaataattttaaacatatttggctactttccttatttacttgttctaattatacaagtagtcagtattttgcacaaatagcaaaaaagtttggaaaaattatcttccaaactttttaatttatttagcgatcgccacaactcttttttcacggataacggtaatcttaatattacctggataatcaagttctttttcaacctgattacgaatatcacgtgccaaaataactgtccgatcatctgaaatttcgtcaggttcaaccatcacacgaacttcacgtcccgcttgaattgcataagcctgcttaacgccttggtagctcttagcaatcttttccaattcggtcaaacgtctaatataattttccaaactctcgcttcttgcaccaggacgagcactagaaatcgtatctgctgcaacaacaagttcagcaataaacgacaacttaggcacatcgccgtggtgtgcagcaatcgcatttactacaacatctggttcatgatatttacgagttagttcaaccccaatttctacatgggaaccttcaatatcatgatcgatggctttaccaatatcgtgtaataaccccgcgcgaactgctaatttttcatccaagcctaattctgcagccatcgtgcctgctagcttaccaacttcaattgaatgtgacaaaacattttgtccataagaagtacgatatttaagacgacctagcgtcttaactaattcaggattcatccggtgaattcccagctccatcaaagcactttcacctgcttcatagatgtcatcgttaacttcttttctggccttatcgaccatttcttcaattctagctgggtgaatgcggccatccttgattaagcgttccatcgctcttttggcaatttcacgtctaattggatcaaaaccactcaaggtaacaacctttggcgtatcatcaataattagatctattccagtcaaagcttcaaatgaacggatattgcgtccttcacgaccaataatccgtcccttcatctcttcatttggtagatcaacaacagatacagttgtttcggcaactgtatctgccgcgctactttgaatagcatccacaatgacctgattagcataatgatcagctttagcttttacttcttcgttactatttctgatcatctcggctcgttctttgactagttcatcagataattgactaagcacaatcttcttggcttcttcctcatccaacttagctacgtcataaagcttttgccgtctagtttctactaattcttcagcctcagttaattttgcctttaagctagcatactgctgctttaattggtcttccttttgcgtgagtccactttcacgttcatctaataaagaattcttatgatctaaggtatcttcacgttgttgtaaacgatttttctcccgagctaaattatctttcttggaatttaactcatcctcggtcttttgcctaaaatcacgaatttgttcttgagcttcaagaattttttcttttttagtattttctgcactttgcttaacagccgctgctgcttgcttttgtgcattaacttcagcttgtgctgcagcaacctgtgccttagcatcagctaaaatgtggtcagcatcattctgggcattttgagctttttgttcccaagaatgcttgcgaattgcataaccaaccactgaacccaccaagaatgaaacaatggcagttgcgacgggaatcataattgttaacatattattcatgattactatcgccttttttagaattattcacacaacttttatgataaagaacctatctgttcatgtcaattaaatcaaaaaaccttggaaaataaatccagggtttttgacataattatttagcttgttcagactttttatctgtagcagcttctttttctgtcttggcttcttcgcgcttctccttgatcttttctggatcttcacgatcagcaattgacttttcatcaatcccgtaagcttgacgcacttgcttttggatatcttgataaatatctggatgctcttctagatacttcttagcattctcacgtccctgaccaattcgatcactcttgtaagagtaccaagaacctgctttatcgataatgtccttatcagcagccatgtccagtaattcaccactttgtgaaattcccttaccgtacataatgtctacttctgccaccttaaatggtggagcaaccttgttcttaacaactttaattttaactctgttaccaagaacatctcctgattgcttaatctgttcagctcttcttacttccaatctaatagttgagtaaaacttaagagcacgaccacctggggtagtttcaggattaccaaacattaccccaactttttcacgaatctggttaataaagatggcaatagttttggttttagaaatattacctgataacttacgcaaagcttgactcattaatctcgcttgtaaaccaacatgggcatctcccatctcgccttcaatttctgctcgtggtactaaggcagcaacagagtcgactactacaatgtcaattgccccactggaaatcaaagtatcagcgatttgcaaaccttcttcaccagtattaggttgtgacaaaattagtgaatcaatatctacacctaaagcttcagcgtaagcaggatccattgcattttcggcatcaatatatgctgcagtaccaccacgcttttgcacctcagctacagcatgaagggctaccgtagtcttaccagatgattctgggccataaacttcaataatacgaccacgaggatatccacctacaccgatagcagcatctaaagctaatgaacctgttggcactgttgaaatttgcgtatcagctttttcgcccatccgcattacagcacccttaccgaaattcttttcgatttttttaagcgctgcatctaaagcagcctgtttttcgtctttggccattaatgtcctcctatttttcgtacctaataattatactttgaccgccgtccaatttgcaagagaaatgcaaacgaacgttcaaaggattttttaccctctattatttattacgctaaaaatcgccattatttttttacaaaataaaaaaagaagcaaatgcttctttttaatcattcttgacttaatactattttacattgagcccttgaatacgccccatgattggtggaagtaatcgtaacctgagtaaatagtaaagatcaacgcaaggtaaagtaagatagtaccaatgtggaagaagtcaccaatcaataagaaaatgattgataacatttggcaagtagtcttaattttaccaggcatctttgctgctaaaacttgtccttcattttctgctaagatcaaacgcaaaccagtaacagccaattcacgacaaacgatgatagctactacccatgctggagcaagtttcaattcaactaagaaaatgaaagcagtcatagttaacatcttatcagctaatggatcagcaaacttaccaaaattggttaccatattacgtgaacgcgcaatgtgaccgtcaaaccaatcagtagccgaagcaacagcaaaaacgatagcagcaataacacgactccaaacaacagttgagcctgctgcttgaacactagcattcccaccaaaaatgatgattaacataaatactggaatcaaaaagattctaaaaacagtaagtttattaggtaaattcattctaacactcctagattttaattgttgttattatttccaccatcattgccattgttagtgtctgctgatgattgagtagtagatgattgttgagtttgactactttgttgggtttgttggctactttgagtagtagtagatgattgttgacgactgctttgacgagtagcactgctttgagtagttgtacggctttgggtagaactactattggttgtattgttattagtagagcccgtattattagaactactattattttgactagtagttcccttagccttaccaatcaacaaagtaattgtcctgtacgcattgtttgctgtatatgggattttcttacctgcaatagtgattgaagtaccattatcgttgcctaaagtaatcactactctctctgcattgcttggcaaagtcatagtgtgcttttgattagcaagtaaagttgattgccagctattagcattaccattgacttgtacacccgctgaaatattttggttttcaccagcacgcacaactaggcgacggtttttattcaagccagtaactcggtactcattgtcactaaccttagtaaccttaactttattgactactacttttttagctttcttagaagatgacgatgatgacttttgtgatgaaacagttacatcattattatcagcttggttcttttgaccacctgaagaaagacgagcatacaaaacgtacactacaagaattacgataattacaccaagtccgatcgcaattcgtggcaagtaattcttccacaaatttttcttattgtcggtggtttctcgtacttcttcactcttattatcaatcgagttttctacgtactcatctggcttagcttctggtacatcatcgtggtaatcacttaataactccttaccatccaagccaacaacttgtgcatattgacgaataaatgctctaacataaaaatcgcctggaagtttatcaaattcattcttctcaatcgcttcaagatatctgctctgaattttagtagctttttcaatatctgcaattgaaagtcccttagcctctctggcgctctttaatttatctccgatatctgccatatttacctcttcaaattttaatttatcatgttgagtataccataaaattctcattacaacgtcttagttataaaagccatccacctgtaacataaattgtctgtcctgttaaataactactacgtcgatctagcagtgttctaacccagtatgaaatatcactgccattggcccaacgaccaactgggatttcatcttttacctcttgaatcgtatcctcagaaaagaatgcattcattttggttttaaccgcaccaggcgcaattacattaaccgttaagttattggaagcaacttcacgcgcataagcctgagcgaacctggttataccacctttagttgcactatagacgctttctaatgcactacctgcaccaccatagactgagcctaaataaactatacgactaaaatctcgtttcatcagttgtggctctaacaatttagttaacttaattggcacagtaagattaatattaatcagatcagtgatatttgctaatttttcatcacctaaaaaaccatacttagtaattccttgagcaaaaactactgcattaactgacaacaagtttttaacaaaatctgttaactgtgcatcccctgtcgcaaaatccaactgtagcgacataaaatcctggtcaggatgcttagcaaacagctcttgaactaaattttcagctttttgagaattagaatgataatgcaagtataatgaccaaccggcatctgccaaatctcgacaaatatcttgaccaataccgccagttgcaccaaagacaattgctcgcttcaactttatcaaccccttacttgttttctaagtaagcagaacaaagttcactgtctttcataatcttttggcagtagtcataaaactgatcaaaattcatcgcctgcaatttagctatattttgtgttaaattttcatgatctaaattttcttcaattaattcaattgccaaataagacagatcattacttgtcctagcagtgcgtgctaaccattctttcttttgcaaaatgaagttttgtctaataaaacggtattccgctgaatttttcttaattggttccgtcaataccctctttatttctgcaattacttcttgagcttgaggacttacaccaaaaatagtagcaaaatcgccctgcctggtgtaattaacagaaatctgcagcgaatccattaacaactgcttttttctcatttcttcaaaccatggtcccattgcacttagttttgattctaacattatttctaacagaatttgagtcaaatcaaagcttaataatactttcttaaagtttttaaagcgaattcctaaaccaaaggaattagaattacctctggctggcaagacttgatcatgtaacatgcgaaaactaacttgtttttcagctgtgcttttacctttcccgtgcaaatatttttgctgcagctttcctacttgccgcaaaatcgtttgcacttgattatcagaaaaatcaccgcaagcaacaaattgcatcttttctggcacatacttagcctcataaacttgggtcaagtttttcactgtaacttgattaattgattctttcgtacctacaacttcgatccctagattagaatcaccaaacatatcatgcataatcgcattatttacgctccaagttgggtcatcctgatacatggccaattcttgttcaataatcggagcctcttgcgcgatattttccttagtaaaatacggctgccctaccaattcaaacaagagatcgatcattttaggcgtatgctcaattccactacaataaaacattgtttcattaaaagacgtgaatgcattaacgtcagcaccaatatcttcaaattgcgttgacaaatcaccatcttttttggcaaatagcttatgctctaagaaatgagccgaaccggcaaccttttgtggatcactactaccaaagtcaacaattataccgaaaaatcgttgataaaaatgtggctttaaaataatttcggctttaaagcctgactgatattcttttttgataatttttggtgtcatcattttaaaacataactttcattaaagaataaattttgtgcgaaagctactaactgcttaggtgtagctctcctaattgcattttcacgatcaaagtctaaatatcccgagaacaattcatcacgcaacatttgacccatctgccagttttgaccgtctagaccaatcttcatattacgcaaaattgcctttttagcctttttaaataaatcatcttctacttcgccctgaactagtttacccatttcggataaaataatttttcgagccgctgcaatcttactaggatcaagtcctgcactgactaaaaacaaagaattattggcaaagcagcttgcttcaacattataagctgctcccaattgctcccgaatttgcgtaaataatttagatgattgatcacctgccaaatattgcgataataatattcccattacttgaccgcgataatcaatactttgttctaaaccaaagcccattaacaattgagcttgcacatttccttgatcatcctctttttcaatcaactttcttttagctggaatagttagactagctgtttgaaatgatttagttaaaccagtttgttgaaacatagcctgagctaatttagaaaccagattattatccctggtcattcctaaaatttgcattggtacattagctaaattacgccaataatgcatcatagtcgtgctagtcgcagctttgatttcatctagtgagccaataaatgtctccgcataatcaggttgatcctgataccacaatttaaaaaactgctccaacgcataattagatggttgttcaatcagttcttgatattcttctgctaattgacgtttagcatattccaccaaaggttccgcaaaattaggttgattaactatttgtgcaatcacattaagaatttcttcatacgtataatgtggatccaaaatctcaatcggctcaacaaaattggcataataagtcaaaagtatttctttaccaaaaacttgtggcataatctccagctgtaaatcatataattctgccaatcttttttgttgtaaagcaagtgacggataacttaagctgctattcatctgtattcgcgctagcaaactagcataagctaaattatgtttagtcagcggcaaacgcaaaaaacagccaatagcggctgttgtaaactttttattttttctaattgcaatattagttgtgagcattgtttgaattaccttcattctttattggtggcactaaaacttgtcgtggcttagagccttcagatggaccaacaatccctttagcttccatttcatcaacaattctagcagcacgattataaccaattctaaacctacgctgcaacattgacacgctggccgtctgttgacgtcgtactaaatcaacagcttgctcatagaattcatctgctggctcatcatctttactatcagcatttgatgaattttcaccttttttaggaatcattgtctcatcataactaacctcttgttgcttcttaacccattcaattacgcgttcaacttcatcactagcaatataagcaccttgaacacgttcaggtttagatgccccaattggcatataaagcatatcaccacgaccaagtaatttttctgcacctgtttgatccaaaatagtccttgaatccactccacttgatacagcaaaggaaattctcgatggtacatttgctttaatcaaaccagtaataacatcaacacttggacgctgagttgccaaaatcatatgaattccggcagcacgtgccatttgtcctaaacgaacaatcgcgccttcaacatcgtgaccaccaaccatcatcaaatcactaagttcgtcaactacaactagaatataaggtaacggcttcatcactggtttagttttatcacgattgttttcagcaactttttgattatattcactcatgtttcgcacgccaccagccgcaaatagcttatatctgcgctccatttctttaacaactttgcgcagtgcatttgcggctagcttagcatcggtcaccacagggatcaataaatgcggcacaccattataaactgaaagttcgaccatcttggggtcaattaaaactaatttaacttcttcaggccgcgccttcattaaaatactggctaaaattgtattaatcgctacggacttaccagaaccagttgaaccagcaatcaataggtgtggcatcttagctaagttggcagaaataatgcttccagttacatctttacccaatggtacatccatcggatcgcttttggctttattatcttgatgttccatcacgtctttgaatgaaacaacagacgttgctcggttaggtacctcaattccgataaagggcttaccaggaattggtgcttcaattcgaatatctttagccgcaagcgccaaagccaaatcatccgctaagtttacaattcgacttaccttaacgccaacagctggctggacttcataacgcgtaatagttggtcctaaaatagcttttttaataatcaccttaacgccaaaactcttaaacgttgattgcaaaacttgggtatttttcttaattaaatcacggtcagtactctgatcagtcgatttaattggatcaagtaagcttaaaggtggcatcttataagctttattgactggcgcatcagtttttagttcaccatgatcgacatcggctaattcctgctttaacttttgatcatcttccgcaaaagaatgtgacttaggtagttcctttaccccgtcatcatgttgtggtgcaatttgaatttgcggttctggatcaggtgtggtctctggctcaacttctacgtcttcagccgtcggcgttacatcgtcatcagttggatcggcagggtcaaagtctgctacattaggaaaaatcggtttatcgtcatcaactaaatcttcgtcttgttcctcttttttctgacgccgcttttccaaaacgtcattatatttatctttgacctttaccccagcttctttattctttttgatgaataattgactaactgtctggaatttttcgataattgttctaaatttaacatcaaaaaacatcaaaattccaattggcagcaataaaatagcaaaaacacggacaccgatttgccctagtagtggataaaaaagttgataagctaatgaaccaattaatccaccaccaatgctctcagtgactccagcacgaccaaactccgcggccattgcatgccaaaaagaattcaggaaattactgttaactaattcatgttcaaaatacaagttacattgaattaacagaattcccaaaaaagcgattgctaaccccaagctacgcttaattgttaagtgaatcggttgattatagattaaatttactaggccaaaaagtcccagtaaacctgccgcaaacaaataagaatccccgaagaacattcgaatcaaatttgcgatttgcttacccaaaataccgaaacggacaaaagccagccccgctattaaaatcaagactaaaccacaaatactccaattaagattttgctttttgtttgcttttcgcttattgtagctctttttggcctttctttgtttcttttttgcaggcatgtactcacctgattaattatcgaattcagccttgaagttcaagttaaccggctgacccaaagttaattgggttgtttcatagatcaaggtctcaagttgctcaactaatggtcgagttagtaactgccaatctgaattactaatgtcagagccatcaccatggtaatcttttaattgcacgatttgatgaatcaagccgcttgcttcaaacatagctggtgcaggaattacatcatattgaatagcaacatcatagtaactaccattttcttctgaatgctcatcgtcaccgctaacatctaattttctaattcctggtctaacgtcactaattggtttggtatcttcatcaactaaatcataatgaaatgcctgtacgataatatctgtctgtttttcaaaatccattatttattctcccctagattacgttcatatctttcaggacgatcatagtcatcttttaacttgtcattttcataatgatgggttgtttccatattaggaaaaccttgctggcgtaaagcttctagcaaaaccattgctacagaattagacaagttataacaccgaatgttatcagacattgggatacgtaaattacggtcatagtattcacgcataaaagtttctggcaaaccagttgtttctttaccaaaaacaaagtaataattcttgttaggatcagtataatcgacttgtgcataattttttgatgagaatttagaaattaaatacatctcatcattaggccctaaagtcttcaaaaaggcattcaagtcatcatgtctgcgtacatcgaccttatcccaataatcaagacctgctcgcttcatttttttattatcgatttgaaaaccaagtggttcaatcaaatcaaggacagtgttagtccccgcacaagtacgagcaatattgccagtattagctggcatcaatggttcatacaaaactacatgattagtcattcaaaaaactccttatcaaaaaaagcgtagcttttaagccacgctttaaaactatctagtatttattcgctttcgtcatgatctgcatcccccgtggtcgaagaaacagcattctcttcaaagagtttagactctcttcgataataattgtacacgcgagacacaataatcttcaagatcgcataaattggaataccgaaaactacaccccataagccccagacggcactagcaccaatcaagagtaaaattgttgtaattgggtgcatttccattttattccccattacccatgggctaagaattcttgattcaattgtttgttcaatagcaaaaacaattaagaccttaattaacattgaacctgaagtcataattgaaattacaattacaggaatcattgctaatggtgtaccaaagtatgggattaagttcataaacccagctaaaattgccaaagccacgccatatggtaaaccaattagaatgtaacccaatgagaacatcacacctacccaaaaggcaacagtaatttgaccacggacatatgaagcaacagcatagttaatatcatataataatttgctaaaactaggttgccatttttcaggtgcaaacttggtaatatatggccgcagttgatgaccatcttttaacatgaagaataaaataaacggtgcagttaacaaagtcatagccaccattgtaataatgctgacggcagatgaaatattgccgatagttgcattgatggtactttgtccagacttaaataaggtcttctgcgtattatcaatcatgcctttgatactgcctttaaatgaatgtaaacgcggatcttgcaacgcattttgtgttgcattaaccgcatcattccaaatatgaggccagttctttatcaatgaattaatctgattctgtgcaattggaaccaagatattaataatccaaattaatgcgacaactactagtaagaataaaactataattgtcaccactcgcggaatcttaaattttctttcacaccaatcaacaaccggattcatgatatagtactgaattaccgctaataataatggcggtaaaattgcactaaagaagatccaggcaggattcaatacaaaagatactttattaaagacccaaataattaaaaagaatagcaggacgtttaataaaacaatactaaaacgattatctaagaaccattttttaaaaacagttccacccctatgttggttattttccatctattcatcctaatttttaaatgtgttcataaacaatatcatcatcaaccttaaaattaggtaatggttgatcaatatccggatcaaagtagatcgcattagcaagtggcgtcttagaaacgggacggttaaagaacaaggttgcgtgtcccaatgccttcatgttgctctctaccatcggaccaacatagtttgcaacataggtttgaccatcaacagtgattgtatcgccttttttaaaaacaaaaccactaactggcgtctcagtactgaatttttgaatgacagaaacgtcttccaaatccttattagcaccctcgccaaataaaattaccatgccatctttattatcgacggcctttttaccaatttttttaatatttgcaatccatttcataatataatctctccttaaaaataattttagcataagaaaagctgcttaaaaacttaagcagcccaaaatcggcgattattttttgctcaacaggaaatcgtgtttttaagcgtctaatccgctttcatgctatactttattttagacttatttttatttagagatggaggcccacacatatgaaggttttaatcggaggttacaccaaaaaaacttccaaagggatttatgaattacctattaccagtgcagcaaatgatgcccgtttaggcaaagctgagaatattattagcgttggtggtccaacttatttccgaaaagatggtaatttaatttttactgttaataacgctggcgataaaggtggaatcagcgtctttcaattaagtgatcaaggcgcaaacgaagttgaccactatttaactccaggctcttcgccagcttatgtaggaattaaccgcaccaaaaagttgatttacactgctaactatcatactgctgtcttgtccgttttccgctacaacgacagtggcaagctcgatctagttgatactgtaactcacaaagctgaaacgttgggtccgcgtcctgaacaagttgacggtcctcaccctcacttctttgatgaaaccccagctggtaacttggttagttgtgatctaggcaatgataccgttgatttttatagattagaaaatgatcaattaaaacacattgctcaatataagtgcgaaactggctttggtacacgtcatatcgtcttcagtaaagatggcaattacttctacgttgtcggtgaactttctagtcaaatcaatgtcgttaaatttaacgaagacacttgggactttgaaaatattgctacttataagacaattcccgctgattttactgaccataacggagctgctgccttatatattagtcaagatggcaaatatgtttacacttccaacaggggacataattcaattgctgtcttcaaagttaacgacgatcatactttgagcctggttcaacgtgtatccacttttggtgacttccctcgtgattttaattgggataaagatcagcgctacgtcgttgtcgctaatcaaaatacagataatgctactctttacacaagaaacgctggtactggtagcctaactcctattcaaaaagaaatttccgtaccagaaggcactcgcgttcttttcaccaaatagtaattagcattagtaccaaagtcatggcgcaatagaacgtcatggcttttttattcctacaacttaaagtaaaatagaaataaatgaaacaaaatataagaaggtgacaaagtgaaaagaaaaataattcgaatattacttttcattcttggcgggatattagggttactacttctgtataaactctatttaaattaccgtcctgaattgaatttattacttcattttgatcaccataatgaagaagtactcgttaacatggtccgtagccatggtattgaagacttagcctttttatttttacttaatgcgatctgtgtagcaattcctggcttatccaacggaatcttttgtgttctcaacggaatcctttatggccctgcctggggatttattgttaattggatcagtgacattttaggccaaataattttaatggaacttttgcaaaaactctatgacatgaaaaagatgtctaacagtaaagtttataagttattgactggattaaaatcaccaatgcttggattaattattggatatatgattccatttattccgagtgcgacagttagctatgtcaacattatgattaataaggagcaacgtaaaaaacagctaataccaatcattatcggtgtcatccccttcgcttacttatatgcttatggtggcgattcaatcttgcacttagacggaacacgattgattaaagttgtaatctcattcgttgtcattgctttaattgcagtagctattttgcttagtctgagagcaatcaaaaagcgtacaaaaaaagcttgaatttactcaagcttttttattatgcctagcatatttaaactaagttagcttcttctaacagttcttcgacccaagttctcttgattttcttcatccctgttttgagagctaacttctcaggtaatggcatctcttgatcaactaatttcttcttgtcagacatgtagtacatcgcacgaagcaattgacgaatatcataaattgagtcaaatacttcaggtacaccacggtcaacgttaagcaatgtataaacagcttccatggcagttctgacagaatattcggtggtaaagacagtgtctctagttggtgattcggcaaaattgccaataaaggcaatattaactgatccttctggaacaacatctggacggtccccatcatgacgaggcataaagtaactagtgatatatggcatgtaaactggtacggtattcatattttcttcactagccaattcgctgatttgactctctggcacgcctaagtgatagagcatttcctcggcaatttctttaccagtacagtcaacgactctcttcttgatgtaattaccctcagtatcagaatacaaagcataaatccaaacaacgatttgatctggattctggctcttaaagtgaggttgacggtgaatagtaaagctaagttcccaattagagtcaacaacagtgataattccaccagtattaactttaccatcgtaaaggctgcgcttagtcaagcgttcaaagtatggagctattttcttattttccaaggtagctgtagctgatacgaaccaactacgctctggcaagttttcacagaagacatctggatgaccaaagtcaggatcttgtttagccaaattttcccataatttccatgaagagcccttgtcgtgagtaattggtgctggggtattttgatcaccataagtagaactttcagtgattgaaccgttagtcacaaagacaatatcatctggggttaaatcaatatcactttgctcaccattcttggtcatcacgatcttcttggcaaccttttgcttgccctcatgatcaacaaccacgttatcaacgtgacaatcatattcaaattgaacaccgtgatcttttaaatatgccaaaagtggcttaaccatggactcatattggttatacttgttaaacttcaatgcggtaaagtcaggcaaaccatcaatatggtgaataaagcgcattgcataacgccgcatttcggctgctgagtgccatttttcaaaggcaaacattgttgcccagtatgtccagaaattagtcttaaagaagtcatcactgaagaattcttcaattgtttcaccttggagttccttttccggtgtcatgattaacttcacgatttcattagtgcacttacctagaccatattgaccatcacttggtaagcgatcaccgcgattataaattagacggcaattggatgagttaggatcttctttatcaagccaataatattcatctaagtatgatgcgccagggatttccaaacttggaatcgatctgtacatatcccacaaacattcaaagtggttctccatttcgcggccgccccgaaccacgaaacctgcattaggacgcttagcaccatcaagtgaaccaccagctacgggtagctcttctaaaatatgaatattttcacccttcatttgtgcatcacgaactaaaaagacagctgcagaaagaccggctaaaccactaccaataatataagcagattttttatctacgcctgcgggctttttggcatccgcaaaagcctcataattaccattggaatagtacataaagatatcctcttttctgtataagtatagtttttaacattacactttaattataaagaaagcggttactagatgcgagttttttagaagttttagctaataactttagaattctttattaattagtttctgccacagttcttgcatatcttttggatcattcaactcaattgttttacatttttgctggctaaatggatccggaaaatttaaataaaagcaatttaaggcttggcgtgaaaacccatcttgaattccatataaaggatcaccatataaggggtgtcccagataagccatgtgaacacggatctgatgggttctaccggtaagcaagcgtaactctaccaagctagcacctgtaacctgatctaggactcgatacgcggtttgagcgtcctttccatctgccactactgcacgtttaactccactaccctttttgccaatcggttgatcaattaaaccagttaactcattcggagcaaaattgccatgtacaattgcatgatattttttgacaaatttctccttgccaattttactaaaacgagcatgggaaattgcatttttccccaccaatactaaaccagatgtatctcgatctaatctagtaataacatgcggcttcaaatttttctgtcctttttgggcaaaataacccaacaatcgattgaccaccgcatcatcatcttcatagcgtgagggaattgacaacacacctgcaggtttgttaactacaagataatttttattctccaacacaattgatactggattattcgatggctttaaaaaatcatttttcttttcttcaccactgataaaaatcacttcatccccagcacgcaaattaaagctagtatatcttcttttatgatttactaaaatcatgccatgatggtgtttagcattgtttaacgcttgatgcgaaaaaccattttttaacaaaaaaggacccagctttttggggtctctttcttgcacaattagtttaaataaactagtcatttttttcattatctccaataaacgcattttgtacgcgtgaccaaaaatgatggtggccaaattgatcaaactgaatcgaatgccgcgaaattcgatattcaatcttcttagcattacgtacatcaattcttgctccatcaactgtcatcacaaaatgatctgcattaggaacaatcgaaatccattgatcaggcgcaatcacaattggtgatgacaaagttctaaaaactcgattattaattgaggcaatttcagtcatttgcaacgcttttagccggggatgaattactgcaccacctagtgatttgccataagcagtcgaacctgttggtgttgaaacgcaaagaccatcgcctcgaaagttttcaaataattgatcattaatgtacacatcggcctctaatgtatgtgaaactcttttaaccgctgattcattgacggctaaatggtaatgagtttcacctgattcagtgagcatctttatttctagtaaaggatacttcgctggttcacccttggttactgctaaagcatcaaccattttttcaatatcatagttacgccaatcagtataaaaacctaagtggccagtatgaatcccaataaagcgcacagaatctacttgattttcatagcggtggaaggcattgatgagggtgccatcaccgccaacagtgatcactacatcaggatatctagcatcaaagataaaacctttttcctgaagcagcttcttaagctgcgcaactgtctttaatgtttcatcatagttattatgcgctattgttactttcataatttttctttgcccttatttttggtaaaaattttctgagcttcttggacctcatccttaattgacgacatttcttcgtctagtctataagcggcttcagccgttgattttaatctagctgaaatgtcatcaggatagacaccttgatatttgtaatttaaagtatgttcgacagtagcccaaaagttcattgccatagttctaatctgaacttccgcaattaattttttcggaccttctggtaagtaaaccgtatagttaatcaccatgtggtatgaccgatatccactcggcttagcattttgaatataatcacgctcctcaacaacttccatatcatctcgagcatgaatcaaatctactaccttataaatatcgtctacaaattgagtaacaatcctaatccctgcaatatcttgcatatcagtctcaatgacatcaggactaattactcgccgtttcattttttccttgatagaatcaactgtctttacccggccaattacaaattcaataggtgaatgttctcccttagttaaaaagccttgtctaagggaacgaaatttaacctttaactcgcgaacagcttcgttataaggccacaagaagttatcccaatctaattccatgagaaaacattcctttcttaagcaaacaaactcattttaccatataattaagttaaacagttcggaggaaaaacagatgagtaaaaatcgagaaattgaagcaaaaactcttttaaataaaagcgtttatgatcagatcactgccgcttttccaatcaaaagtgactttacccaagaaaattattattttgatacagcagatgatttattaaaaaatcatcaaattagcttgcgtattcgaatctatgctactcacgcagagcaaacaatgaaggtaccggatcctaatcctgtacaaaagaatttccatgaagtaattgaaattaatgatgaattaactcacgctcaagctaaaaaattagtagcaaaaaagcattttaaattcactggtaatattggcgcatatctagataatcattttgccaatgaccaaaaaaagctacatcttttcacctggagcaaaacccgcagaattttgatgaacgggccacaaaactgtgaattaactctagatgctacgtcttatccagataactatcaagattttgaattagaaatcgaaaatactaatcctgctttaattcaaacagtattaactaaacttgaacaagaatatgactttgaacaaacggctgctaacactaatcaaagcaaaatagctcgtgcaagcgctcaccaaaaatagtatatagaaaataaggcatattttttgtcacttattttttttcttgctaaagtaactaatagtaaatcaccaaagaggtcgagattatgtttgagatttttctattcatcaatccaatagggatttattgttatgacactgaaaaacagattcgtaaaaccgttgatgaattaggggtcgacgtttgttatcactatattcccattgcaaatgtttgtttaatcaatgatgatgcgattcgccgacgcaaagatgaccagaagttgcctgatattagtaatttttctagagcaacttatgaagcattagaaaattaccacgcgattaggctggcctatggcaacaaaaaagcccgtcaatacctgtatgaattacaaaaaaacttgagcaaagatgcttcagcttatacacctgagctgcttaagcggatcgcaaacaaattacatatcaaggatgcggatattcaggcaatcaaacaaactgattacctgcgtacttctattgaagaagatcaaaaactagccaaccaatggaatattaaagctactcctaccaccgttatctttaacgaagacaacgagcaaaatggagtattgctagagggaccaatcaatcaacaggatttagttaatctaatgcttccagattgtcaaaagtgtttttcagactatttacctgcggagcatcatttacgccttatctaaaggcgttttatttttgcaaaaaatcactaacccgatctctttcacctgggttacgccaagtagcaaaaactttatcaggtaaatcatcaagagttaatttgcgttcataaagcatctctcctattttcaatcctaacttttttttttgcataatttgctggcgtaaatattttctttgagttgcaatgttcaaagaatattcttttttgaatggcttaaagcgccaaaaatcttttatccccaattcatcaaggacaaatgatttactttgataaaccaatttattagctaccggttcttcgaaaacattatattttaagcaaaaacgatttctctgtggattaatttctaaatagtaattcccccaagctttattttgtcgaaagaaaatcaactgtgtgcgtttcaatcgccgtttcaaatagtgtcgctgtcccacaatccaaatatcttttacaccaattttttgataaagctgatgccgatggttaaattcttgttgactcaacggcgcacattgaacttcaaacgctaacttagcagttgctaagacatctgcacgcaattgtccttcagctaatggaatctcaacttctgccggaaaaccagctgccgtcaaagctgacttcaacagcattttcgattggtgatgctcctctttttcacccattaagttactgtacttcacaagatgcttaaaaaaggctgctttttgctccgacataaccaaaattacttttttattgcaatgtggacagtgataattatcacgattcaatttcttttgccttgcattaactaaacatgcttcgtcaactgcaaggactaatttcttatttaacatggctgcatacatttttctcacccatgttttattacgtaaaaaagagacggaattttgtcccgtctctttttctttaaagaatcttaataattagctgcttttaaaaagtaatgtcgaatctggcctaaagcattttgcatcaataagcatttgcctgtttcttcaactacacgcatcttatcactatcgaccttaaaaccaaattcgttggctattgtccacgcatctgctggtttaagctcctcatattcttcatcaagaaatgccaaatttaagaaatattgtccatgcaagtaatacaagctagaagctaaatcatttgccttaaggttatcagctaattcaattagactacctaaatcatcaaaatagtaagcctgagtcttgcgcgatctccaatcagttggctcattgtttttatcatcttggttaaaaaagttgtgagtagctggtccttgaggagccgaatttgaattcgtactctcctcatctaaatcaaagaaactttttgaatcatccgaattcgttgatgattgctcatccttaggaaagctatcacccattagtttccttaaattctgtgcatcgtccggcttaactttggtgatcatcaaatctaatcccccattattaggcattacttgaaatgatactggatcaccattggcaaattcatggtcttcatcgacctcatcaagaattttatagaagaagtcttgaatcttttgtctattacctaataaatcaagcattcccatcccacgacgagccaattcagctttatcaattcgaactctgatagtattcttatcaatatgatctacctgcacaggatctcacctccatgaattaatatatctattgtagcgtatttttcgtttaaaataaaagtgttagtctcaacaaaagccttaactaacacttttcaatcattttataaatctgcaatcttttgtgcttcagccaattccaaccgacgaacttttcgtggcaagaatcgacgaatttcatcttcattgtaaccaacttgaagtcgacgatcatccataatgattggtcttcttaacaagctaggattcttttctactaaatcaagtaactgatcaattgataaatcgtctaaattgattcgcaattgttgaaaagctcttgagcgggtagaaatgatttcctcagtaccattttcagtcatccgcaagatctttaataattcttttttagtcaatggttcagaaaaaatgtttctttccttgaatggaatattatgtttttcaagccacgctcttgccttgcgacatgaagtacaactaggagagacatataaatctaccataaaaatcacgctcctcagaacaaatatttgtatacgtttctttactcatagctagtataccatataagcttctttttcgtaagtgcttaatttatcgtttacctctgctatttacttaatactaaagataaaacgtgaattatttgtgaagatttcgttcgttttgtttaaaattattaaaaataaaaaaagagacatcacagtctctttttgcaaattaaaactacttgttcaattttttcattaaattattaactaatttttcgttgtcttcagcagtttctgatacataacaagcttcgttagctaattctttaatgtcagcagtgttcaatttcttcattaagcttctgatacgcaaaattgaagttgcactcattgagtattcatcaagtcccattgaaagtaagattgggaacatagtgttatcaccagcagcttcaccacacataccacaccaaataccgttttcatgagcaccatcaatagtgtgcttaatcaaacgaagtactgatgggttatatggttggtacaagtatgacacattatcattaccacggtcagcagccatagtatattgaattaagtcattagtaccaattgagaagaagtcaacttcctttgcaaattgatcagctaaaacggctgcagcaggtacttcaatcatcataccgacttgcaagtcatcaccaatcttaacgccttctttagcgagcttatctttttcttcagctaaaatttgcttagcttcacgtaattctgctaaagtaccgatcattgggaacataattcctaatggaccgtatgcagatgcacgaagtaaagctcttaattgagttctaaagatatccttgtattgcatagaaagacggatagcacgaacacctaagaatgggttcatttcttctggaagatcccagtaatcaaggtgcttgtcaccaccgatatcacaggttctgataatggtttgcttaccattcataccttcaataacttccttgtaggcatcaaattgagcttcttcagttggaaagtcactagagtccatgtacaagaactctgttctgtacaaaccaatggcttccgcaccattatcctttacacctggcatatcattaggtgtaccaatgttagcagcaatgataaatttcttaccatctgcagtaactgatggttcattcttaagcttagcccattctgccttttgcttaatgaatgcttcactcttttgcttgtaatcagctacttgagcgtcacttggatcaataattgcatccccgtcaagaccatcagcaattaacatatcgccgttcttaacatccttagtaattgagtcagtaccaacaacagctggcaattcaagtgaacgagccataatagctgagtgagctgtacgaccaccaatatcagtaacaaaacccttaacatactttttgttaagttgagcagtgtcacttggagttaagtcgtgagctacaacaattacttcatgatcgattgaagcaggatttggtaattccttaccaagaaggtgagccataatacgctttgaaacatcacgtacgtcagcagcacgttcttgcatgtaaggattatctgtcatcccttcaaaaatagcaataaacttcttagcagtctcatcaagagcagcttctgcgttgatctttgaatccttaatttcattctcaatggcaccagtaaattctgggtcatttaaaatcattaagtgtgcttcaaaaacttgagcttcttcatcgcccaagctttctttagcaatatcatgaatcttttcaacttcagcagttgaagtcttaattgcatcgttgtaacgagctacttcagcttcaacatcagcaattgaagatttagagaatgaaagatcaggctccacaagaagatatgctggagcaatagcgataccatcacttgcagcaattccttttaaagtcttggtcattattcagctaaaccttcttttttcatagtgtcggcaattgcgtccaatgcgtccttttcgtcatcaccttcagcagtgatagtaacatcagcattttgaccaacaccaagtgacataacacccatgattgacttcaagtttactgacttaccgttgtattccaagttaacatctgagccaaactttgaagcagcttgtactaaaagagtagctggacgtgcatgaatacctgtttctgcaatgatatgaaaatcgcgtttttccattataaatatctcctttaaattgaaaaattaaactggtaataaatacccattcgagtattagattatcatgtttttacagattagacaactgcaatgtaacagtttacattatttattcatcggtattcgtagcggtatacacaatcgcgccgcctctttctgccctaccggtaatatattgtctttttccataatttctaatagtcttttgaagatcaaacgcatcttttggctcaactttatactcttttatctcgcctgagactaattgatctagaattttctgataatccaaaaatatcaccactcttttaaaattttataatttttccactattaattctactcgtattatataaattaaatcgtattatataaattaaatcagtgataatgattattcttttagtttgtttattcgatcatcagatgctagtctctaattgtcattgaccttggtcaattggtataggttgtttccttctgtagctttgactacttttttagtctgccgcccaagcagttttactaatgacttactcacatgctgtatcgattctggctattactgattcagagcagattcagtcgcagctttttagcttgaacctatgaatacttatattttgcgagattgtcttagaatctgtaattagggactaacatgtgatgatcgatctatgaccaaatatttgctagaaaggaggccattctcaatgaaactttttatcggaattgacgttagttcaaaagatcttcaagtcgctattactgactcagaaaattatcaaaaacctttacttaaccaatctttttctaatgacctgattggtgctaatgaggtcaaaaagataattcttcaacttgctaaacagaacagctatgacaaagtaattatcggcatggaagccacttcaatctatagctttcaccctgcttatttctttgccaatgacgaagatttacaaaaaattaatcttgaaactgatgtcattaatcctaaaaacactaaacgatttcatgacgtttacgaagaaaataagaatgatcctactgatgcctattacatcgctgaatacttacgctttggtaaataccatgtcactattgctcggcaagaggaatacttagctttacagcgtttaactagagctagatatgaaatcacatcttcgctcactagagctaagcagcacttcattgaaactctttattatcgtgtaaacaaactagttaccgttgacaaagacaatattaaaacttctatttttggcgcaacgatgctgtcaattgttactgatagtaaaaccatcgatgaaatcgctgaaatgccaatcgaggatctaattgactaccttcaaaccaaaggacgtggccgcttctctgatccagagactttagctaaagcgatcagaaaagccgttagaggatcatatcgcttaggtaaagtcatgaaagactcgattgatgccgtattatctgtttactatgccgaaattaaaactaatcagaaattgattaagaacttagataaagcaattacagatatcgtccaaacgcttcctgaagagagaatactacaatctattccaggaattgggtcagtttattccgctggtattatcgctgaaatcggcagtattgaccgctttgacactgaagcacagctagctaaatacgctggtctagcttggcgtcaaaagcaatctagtaattttgatagcgaacacaaaccgatgactaaaaacggaaatcattatctaagatattatttggttgaagctgccaacctgattagacaaagagatcccgtttttcggaagtactatcaaaagaaatacgatgaagctttctattctccgcataaacgcgcttgcgttctttgtgcaagaaaattaaccaggaccattttcactctgctcaaaaatggtcaaatctatcaaacaccgaggtgattaattggtctaaaacatttttggaggagtaaataatagttgttaaaaaatcccttgaaatagggcttagtttcatgcacgcaaattttggttttaaaacaaactaattaaaaataaaatttaacttttacattgacttattaccacatgactatttatattcaattttcaaaaatattaatattttgtttgcggtaacaaaagtatttcttacaaaaaataagtgtttgagtcttagcacttgactaccaagagtgctaataatataattttggtacagttgaaaagaaaggcggtactatattttgctttgccaaaattgtcatgagcggcccgcttctattcaccttttcactaaggttaatggccaaagccgcgaaatagatttatgtcaacactgttatcaagaattaaaaaatcaacaaggaaatcaaggaaaaatgaataataatgaattttttggcgactttgatgatttattcaacgcattaaacggaaataacaacaatgccgcaaacaataataatgaaatgagaaataacgaccctagaatgcaaatggggggaggcgctggtaatggtggtcaaaacggcagaagcctacttgaccaatacggaacagacttaactgcccttgctaaaaaaggcaaaattgacccagtaatcggtcgtgataaagagattgctcgggttatcgaaattttaaatagaagaactaagaacaaccctgttttaatcggtgaagcaggtgttggtaagactgccgttgtcgaaggcttagctcaagaaatcgtagatggatcagtaccagcaaaattgcagaacaaacgaattatttcattaaatgttgtttcacttgttcaaggtaccggtattcgtggtcaatttgaacaaagaatggaacaattaattaaagaattacaacaaaacgacgatatcattctttttattgatgaaattcacgaaatcgttggtgccggtaatgctgaaggtggcatggatgccggtaacattattaagccagctttggctcgtggcgaattgcaattagttggtgctactaccatcaaagaataccgcgatattgaaaaagactctgctttagctagacgttttcaaccagttgaagttaaagaaccttcaattgacgaaacaattcgcatcttaaaaggtattcaaaaacgctacgaagactatcaccatgttcactacactgatgaagccattgaagctgccgcaaaactttcagcacgttatattcaagatagatttttaccagacaaggctattgaccttcttgatgaagcaggttctagaatgaacttaaccattccttatattgataaggataaaatgcaagaaagaattaatgccgcagagcaattgaaggaagaagccttaaaaaacgaagattacgaaaaagcagcctactaccgtgatcaaattgaaaaatatgaaaaggttaaagatcaaaaggtagatcctgacaagtcccctgttattactgataagatcatggacaagatcgtagaagaaaaaacaggcattcctgttggtgatattcaaaagcaagaagaaaaccaactgcaaaatctagctgctgatttaaaggctcacgttatcggccaagacaaggctgttgaaaaagtagctcgtgccattcgtcgtaaccgaatcggtttcaacaagtcaggccgtccaattggttcattcctcttcgttggtccaactggtgtcggtaaaactgagttagctaagcaactggctaagcaaatgtttggctcagaagatgcaatgattcgtttcgatatgtctgaatacatggaacaatactcagtttccaaattaattggttctgctccaggttacgtaggctacgaagaagctggtcaattaactgaacaagttagacacaacccatatagtttgatcttgcttgatgaaattgaaaaagctcacccagatgttttgaacctcttcttgcaaattcttgacgatggtcgtttaactgactcacaaggtagaacagtttcattcaaggataccatcattattatgacttctaatgcaggacaaggcattaagaacgctagcgttggctttacagcagaaaacgaagatgaagctaatgaatctgctagaaataatatgagccaattctttaagccagaatttttgaaccgtcttgatgatgtaatcgaatttaatgaattgactaagccagacttgcttaagattgttgacttaatgttgcaaaataccaacaatatggttaaggatcaaggcctacacattgatgtaactgctgctgcaaaagataaattagttgaagatggctttaatcctgccttaggtgctcgtcctcttcgtcgtaccatccaagaagagattgaggataatgtggctgatttcaaacttgatcatgcacaggctaagaatttaaaagccgatgttgttgatggtaaaattgtaatcagtgatgaagcaaataatgaataggatttaataaaagacaaagtccaagttataccaaaagatttcgaagcaatattcgaaatcttttttcttaaaaataaaaatatgctactcaatttgaggtatactaaattagaagaagtaaagctaacagaaacaggtgaattccatgcatttaattgatgtaaccaataattactctgatttggttcacagtcagctcaacactaccgatgcaaactatgttaaagtttattctcttggtaatacttcagttatttatactgaaagtaaggattctatcggtattgcacttgaaaaccatgaccgtcgtgttcgcgaagatgagattgaattcgtaatcaagcgtttaattaaagattatgattcttcatacactttgactgtagacaagagtcgtcatgtaatcgaaattcacgttgacaagtaatccaaatattgttgtatcaaaaaaggaggattgattcattcaattctcctttttctttttgctttaaagtttttctgttaattcaacatctggatatttgtcatggaagaaacgttccgcaaattcattttcaaataagaataatggattaccataacggtccttaactaataagttacgagtattagacatgcgtgggtcaagctgttccggatcaatccagcgcgcaacacgatgaccaatactgttcatttcaacttcagaattatattcattcttcattctgaattggaacacttcaaactgcaattgaccaacagcaccaagaatatactcatccgtttgataattgcggtaaagctgaattgcaccttcttggactagctggttcatccccttatggaatgatttttgcttcatcacgttcttagcagttactcgcataaataattcaggtgtaaattctggtaatggtggataaacaatcttgcgcttaccagcataaatactgtcaccaatttgaaaattaccagtatcgtataagccaactatatcgccagctaccgcatcagaaacttgtactcgctcgcttgacatgaattcagtcgcattatttaaacgaattggcttatcagttctagctaaagttacgtccaagcctttcttgaattcaccagaaccgactctaacaaaggcgattcggtcacggtgatgaggattcatattagcctgaatcttgaagacaaagcctgaaaattctggatcttctggacttagctcctcatccccattaactgtgtgactctctggtgctggagccaaatcaacaaagctgttcaagaatgtctcaaccccaaaattggtcaaagctgagccaaagaagacaggagtttgatcacccatagcaatcttctcgcggtcaaacttgttcccagcttctttaatcaaatcaatttcatccagagtatcctggaattgaggatcttgactaagtggctcactatcaggcaacttaccatcttgatctaatggtaaaaagcgatcttgatcatttttgcggtaaagctcaacacgattattagcgatgtcatatagaccctttaaagtttgacctgaaccaattggccagtccattgctacaccctcgataccaagcaaatcttccaattccgcaattaaatctaatggtggacgtccatcacgatcaagcttgttcataaacgtgaaaattggaataccacgttgcttaacaaccttaaacaacttctttgtctgtggctcgatacctttagcagagtcaattaccatgacagctgagtcaacggccattaatgtacggtaagtatcttctgagaagtcctggtgtcctggcgtatccaaaatattgatacgtttgccttgatattcaaactgcataaccgaactagtaacagaaatcccacgcttcttttcgatttccatccagtcactagtagcaaaattgccagttttacgtgccttaaccgtacctgctttacgaattaccccaccaaacaaaagcatttgttcagtaatcgttgtcttacctgcatcggggtgagaaataattgcaaatgttcttctcttttttactttatctgctaactctttgtccattagtcctcgctatcttcttccttttttgattcatcaatcgttaataataccgtcaacaagcgtgaccccttcatccttctagtggtcaaagtcatcccatcaccaatatcaactgttaacttttctcccttagctggaatcacttttaaagtattgatcacatagcctgctatcgtatcaacatcttccatttgaagattagtaccaaattgctcattaaaatcatctaatggcatcttaccgtaaataatgtacttatttgtagctatttgattaaaaagaatctcagtgtgatcaacctcatcatcaatatcgcccacaatctcttcaaccaaatcttcaattgtagctaatccagttacaccgccatattcatctgtcaaaattgctaattgtcgttgcgtttgctgcatttccatcaacaaatcgcccagctcggcagtttctggtgcaaacagcggctcagtcatgacatctttatagtcaagattatcaaaacccttttgtttagcctttcgtaaaaccgttctgatatgaataatccctacaatcttatccttatcacgttgataaacgggaattctagaatatggctcacgaaggatttcatctagattgtcttgaaaactgacttctcgatcaaccatgaaagcatccgttctaggtaccattacttcacgggctgtcttaccctgaaagtccaaaataccttctagcattgaaaattctgtatcatcaattttatgactttcatgtaaagtaacaatttctttttctaaatgatctttagtccccacttttttatcgccggataatctattttttaagcgaccaaacagagttcccgctccaggatcactattcattttcgtactctctttcttaaaaaagttatctaaatatagctattatagcatagagccaataacaattatgttaaaatagcacataagactaggaggttcgtcatgaaaaaaagtcatgtcttactcgtttttacatttcttttgctaattccctatatctgtagcttagctattattggaatcggctataatgcattagttttacattcagctgaactttatcgcacattaatcggctcattagttggcgcaatcattatgtttgctgtcaaggctactattcaacggcctgttgatttattagctgttcaaaccaacgatggcttactgaagcagcttttacgtttcttcagtatcagacggcgctactggcttttagcagctaatattatcttagactttgttctttgctttgctgctacctacataatacgtgctcttttaacacttgatcaaatcgtaggcggctccatcggctttgttttgttaatcatgtttgtttcaacttgtcttggcgcttatgttgaatacgataacctgtcaatcgaccctgagcagcattaattacttgctggccttcaagtacattacttgggccagtttttttgtatccatgtcaagatcccaagtaatatatggcgtgtcactgtcacccaaattttcatgtacttcaattccgctagcaactacttttttggcaaaatttggcacggtactagtcaacggtaagttgaaaaagactaaagtttgattctcttctacttcctccgctacctctgcagctggtaattcaaacttcattaaacccgttggcacttcatcttttgctacatctgctaaaacgccataccaatacataaagctgtcctcacctgataccactaggacagaacgcttattttctaaattatgatcagctaaaaatttttgaaaagtttcatcattttccatttgctgattagcttccataaagctcttttgagcattcatcaaaccagctggaaatggacgaccaataaataatcttgattcaatatttttcttcattttttctcctaatattctactaattcgtctaaatcaattatttcaccgtttaaaaaggcatcaatctcacctgatgaaaaaccgtgactaaacaaatatttttttattttaaaattgcgttcaatttctggaagatttctaaaacgcttgtaagccttaattccttgtttcttcaaagcttctgtttgtgcattctcatcttctttaagatccattgcatcaataataacgttactaatcccgctatcaaagccatgcgttaataatttagtacgcatcttacgctctaattcacgttgtgaaatcttgccaacttgatggctcatcgacttaatcacgcgttggcccacttcgagccaatcttcttcatcaatttcatctaacttatcctgactaatttcaggatcaacgcctttttgcgtcaactttcgtaataaaattttagggccatcagagccaacacgcaaatcatttttgataaacagcttggcatattgacgatcatcaagatagcctaattcattcaattgactaacagcactattggctgcttcatcagagatttcgtgtttttttaaatattgcagcacctcaaagatggtccgaggctcgtaactcaaaaaatgagccgctaaatcactagccttagcatcagcatcaaattgcctaatcttttcaacctgctcatcatttaattctttacctttaagcagcacaaattctgccaacgttttctctccggcagaaaaagcatattttccatcaataaaaacattatagcgacctggccgtttttgtgcacttactttggttatgatcaacttgtttcacctcgcatatttttctacatccatgctagcaaattttgctaaagcttgctaagaactttttccaggtagtacaattaattgaacacaatttagtttttagtagaaagaattaacgatgaacagaaaatttacccataataaaccaaaacatgaaaaagacgtcatcatcactattaaacgtttaggaattaatggtgaaggaattggttactacaagaaaaagattatcttcattcctggtgccttgccagacgaagtagtagttgccaagattgttaaatcatatccacactacatccaaggcgaactggttagaattaaagaaaaaagtccagatcgcgtagacttccctgaaggtgttgatcccgagattggtggcttagaattagtgcacttgtcttacgacaaacaacttgaattcaagaagaacaatatgcttgaatcattacgcaagtaccatcctcgtaattacaataagtataaagttaaaaatactatcgctgctcctgacccatggcattatcgcaacaaggctcaatatcaaattgaaaaagatcatggtcaacttaagcttggactttttgctccaaattcccaccgcttgattgacttaccaaagatgccaactcaaagtgaagatacacaaaaaacggaacgtaaaatcaaggttttaattgaaaaattgcatgttcctgttgccaactatcgtcgtcatttacctggcattaagaccgtagttgtccgtcaatcagaagcaactaaggaaatccaggtaaccttgatttcgatcggccacaagattaagaacttaatccctcttgctaaagaaattatgaaacttggtcatgtagtttctgtctatcagaatgaaaccgaatggcagaatccacaagtttggggaaataaaaccgaaaagcttttgggcaagaatcaaatcaccgaagaaatcttaggtaaaaaattcgccttatcaccacgtgccttcttccaattgaacccagttcaaaccatcaatctttactcagaagcattgaaatacttagacctaacccccgatcaaaccttgattgatgcctatagtggtgttggtaccttaggtattttggcagctgaccgcgttaagcaagttgttggaatcgaaaccattccagaggcagtcaaagacgcacaacataatgtcgagcttaaccacatcaaaaacgctgattatattcaaggcagtgttgaaaaggttttgccagaattacaaaatagtggtgttgcaatcaatgctttaatcgtagacccaccaagaatgggcttagctaaaagcttgatcaaaaccctcttgcgggttaaacctgaaacttttgtctacatctcatgtaatccctcaaccttagctcaagacttagttttacttagcgaggcatatgatgttcgggtcatccaaaatgtagacatgttaccacaaaccccacgctgtgaggcaattgctaagttagtgctcagaaaagatagataaatccaacaacctagtcttgggctaggttgtttttgtatataaaaaagcggctactggacaatcctgtcccttagtagccgcaatttcaagtggatgaggtagctcatcaattgatagtcacgatttttagttgtttggtatgtatttaaacaatggcattatcgcaaccaatattaacattcacttgttcgggtctttacataaaatgtaacttttaataaattggagtttttgcgaacagccaatgataattaatcaaataatttttaattaagctatttatggctgacacctctacgtatagagaatctttcaagtttccaataataatacaattctggagataaaaacttacttatatttttttatagttgttaacttttatttctacctcttccacactattcattatatctagttgtgaaaccgtttacaagaactaacccatatatttttgcaaaaatctttctacttgttgtcgatattgctttggatacattggataagacaaagcatgccctgcaagtggcgcaagccaaatttgcttttgagcagctgttgccgcataattttgccagaccatcttagttggcacaaagtgatccttgccgccatgaataaataaaaatggtcgcgtatttttatttaactgagcaaccgcagaagcatcttttaaataaaagccatttttcactctattaattccactaaccaaatcaactattggaaaccgtggaaaagccttcatatgaaataaattttgagcttgatagttaatttcacctttcacggttgaataaccacaatcttcaataaaagctttcacttgtggtggcaaaagcataccgcttaccatcattgccgttgcaccacccatgctttgacccataattacaattttggcatttgtaccagtttgatcaattacttgatagatccaacgcaaaatatcatctttttcagcccagccatagccgatatacttaccttcgctgcgcccttgggcacgtgcgtctggaacgagaacattataaccaaaatcataaaacattttggcaaaaccagccatactatctccatcactcataaagccatgtaataaaattgcggttttttggcatgtttatcaaggtactgggcgaacaaagttatgccgctatcagtttttaaagtccatgttttcttagaaaaatctctaaaccaaaccttatcacgataaagtggatccttgcctgataattctttggagtcagcttttttattaaacggtgtcatcgccatcttgaaaaagtactcgcttgccgcaaacaagccagctccagcaattaatgcggaagacaataatagtttctttttcatcttttaacacttccaaattcaattatttcacttttcattttataattaaattgctgaaaatttacaatccttatgacttaattatactgaaaaatgcgcttaacagacttgcttcaattaatcgatgacctgaacctgaatactaaattttatctaaagcatgatgacaaactacttaagtggggaaaactcactattgccgaaggaaaatgtctgctgctacccgggcaaacagcaatgaccaaacaaaaattgattaaattagttggccgcatgcgtggtcgcggcatccccttgttaatggtcattgaccaaaaagaatattccattttcggcctacagattcgcgaagatactggacaagcaattttaatgtaaaaagtgtctgggaaaaaactaagtctcagatcatgaaaaaagaacgttgaatttttgtttcaacgctctttttgtatacttttagctccagccttgatattattaaatcatcacaaaataaaaaaggtggaaactaacatgtacaagaattatatcacaggtcaaactgctttaacacttaatctagattttgccattccggccaatcatttggctaatgtcatcagctggtttgtagattcaattccagaagatgttttagtaggcaagactgctaaaacgggccgcccagcctatcatccagccatgatgctcaaaatactgctttttgcttactccagaagagttttttctggcagaaagattgagttgatgctggaagaaaatctgccaatgatgatcttggctgaccagcaaaagatttcatatcatactatcaataattttagatcaagcagccatgccaatgaactgattaaaaagagctttatctacttcactaacctgttagaagatgaaggcttaatcaatgaaggtgctgcttttatcgatggtactaagattgaagctgatgctaaccgctatacatttgtctggcgcaaagcggttgaaaagtatcatgaaaagctgaaaggccaggcagttgaactttatgatgaattgattactaaagaagtagtcaaagaaatggaaaaagaaaaagttcaaactagtcaggggctaaaggaattagctcaagaaactgaagcagaaattaacaagctgactaaagagattgagcaggaaaacaaagccattcctggcggttcacctcgaaaagccaagcgacgtggactaaaaaagattctgcaccggctaagaaaagattatgtgccaagaatgcaaaaatatgaagaagccgaagagatctttgccggacgcaacagttattccaaaacagatcatgacgccacctttatgcatatgaaggaagaccacatgaaaaatggtcaattaaagcctggctacaatattcaagcagtcacgaccgatcaatatgtagttgattatgccatctttcctaatccgacagatttcaaaactttggagccggttttggatcaaatgaccgtgttggacaagtttgacaaaatcgtcgccgatgctggctatggcagtgaatacaattattcgatgctggaggaaaaatatccagacaagaagtactttattccctacactatgtatgaaaaagaacagaccaaaaagtataagaatgatccaactaagctaatcaactggtactacaatgaaaaagatgattattacattgatcatcatggcgtcagattcaatttcaaatattacagccagcgcaaggatcgttctactggtcaggtccgtgattttaaggtttatgaggcagacgagttccagctaacgccagaattggaacaattggctaaaacagctagcggccgccagcgccaagttcgctataatcctaactggcaatatttaaaagaaaaagcaaaagaagttctccaaagcgaagaaggcagacacatctatggcatgagaaaatatgatgtagagccagttttcggacatttgaagaacgtatttggcatgcgcagaacgcacctgcgaggtaaagagaaggtcgaaaccgatatcggaattgcctttatgatgatgaatttgaacaaatattgtcaaagaaggtggctgaagggccgatttttattgttaaaaattttaaagagaacaaaaaaacgatcaagattcttaaaaaaggaaatcttgatcgtttttattcatctggaagctagttttttcccagacactttcttattcttttacgcggtattgacgaatatgatccttagtaccagcaaaataccaagtacctacttcatcgtcgctagttaattctaagccatcctcaggatctaacaaagccgtattgaagacgtcttcatattgcttaactgtcagcttcttccgccgatcaagcattgcttgatcagctgtaggatcaacttgtttttcatatccttcaaccaacttgccactataaaactcagccattgcacctgaaccatatgaaaacaggccaattaatgagccagcaggtaattcaccattctctagcaaactaagtaaactcatataaagtgaagcggtgtagatattacctactcggcttgataattgtttagcagccgcaaaactacgctccaacttgatcattgttgcttgatcttgcccctcaatcgcaatattattagcttttaagcccatcttagtaaaaggtaaatgataagtaattgcatcaaaatcactagtctttaatcctttttgcttcttataatcagtaaaggtcttcttgaagaaatccaagtaaacttgagtcgaatacttgccgtcaactaaagcggtgcgagaataatttggtctccagaagtcgttaatatcttcgctgtaagctgaatgaccattatttagggctaaaatgcttgggtcagctttgatgagcattgccacgctaccggctccttgtgttacctcaccagcagtattaacaccatagcgagcaatatcactaccgatgacaattgcggtttgttcaggatgtacccgaacaaaatcacgtgccatcattaaggatgccgttaaaccaaagcaagcttcctttacttcaaaagttcttacttctggcttcaactttaaggctgtttttacaaataaagaagctgactttgattgatcaatactactttcagtcccaaaaattaatagaccaactttgttcttatcaatcttgtcaataaactttaaagtcgcattaattcccattgaaactgcatcttgcgtaatatccgcaacactcatctctctttgaccaatgccaactaaaaacttattttgatcttgctttcttgcgttcgccaaatcgaccatatcaacgtacttgtctggcgtaaaaagtccaatttgatcaatacctacttgcattatttttgctaaaagctccttagcatgactttcagaataatttttttcactaatcatcgcagctagtagctgcttgcgctcatgttcattatcggttaactcagcaaccacatttctcgcctgcagtttcatatgtcctgcttgaatgccaacagtagaaattgccagcaaagctgctaggttgttggctaaagccacgctaacaataatctcagctagagttttactcgtgattttttgtcctaaaatagcaaaactttgttggacgtcatgacgggccttaattgagccaccaactactccaatcgccattggcaacgttaattcgccaactaaataactaccctgcatcgtccactttgataaactgcgatattggccatcatgattggctaaaactgcagtggctgcttcaattgcccgataatcattgcctgtggcgattaagacggcgtcggctccattcatgattcccttattgttagttaccgcacgataaggatcgtcaattccaatttttcctaatagagcaacacgttgtgcaacttgcatcccaccaatcgtttgtggatcaatcttcactttagccgtggccaattggctaggataatttgataaaatcgcaaataatttttcatcaacaccagcataattttctaatttagccgctaaaaattccaaaatcgagttggttttattcgcgcccatcgcctcagctggatcaaccaatacttttaagtaaagcaaatcctctttctgcacagcagttatttttctagtaccaccaccatgacggactaagctggaaaacttttgattagctaattcgactaagtgcggaaattctttttctaattcaattaatgaaaaagaattgttgaccttcaaaacgatttgaccataaatcccttgtcggtcgctgctagctgtcacaccaccatttctagcaaagatactagctccatgattggcggcagcaactactgagggttcttcaacagccattggcacccaatatttttgtccattgactattaagttttgtactacgcctaaaggcaaacgcaactgccctacaacattttcactcaattcatctagacgtctcagaaccgcatcatcgatttgctctaatgcaataccttcatcctgcaataatttacgtctagcttcaggctctaattgataaaatttcattctgcattctcgatttcataagcaatcgcctgaccgccaccaatacacaaagtaaccagggcacgtctgccttttctcttctttaatccactaattgcactagcaactaagcgtgtacccgttgcacctaaaggatgacctaacgcgattgcgccacccataatattcaatttatcagttggaatttgtaagtcgcgagctaccgctacactttgggctgcaaaggcttcatttaattcgataatatcatagtcatcaaaattacgccccgtcttcttaagcagttttttaactgcataatatggagtataacccatcagtgcaggatcaaagccagcttccgcaaattcacctaacttggcaatttgcgttaagcctaactctttcattttctccttagttgccagaactaacatacttgcaccatcagtcaaaggagacgagtttccggcagtcacttcaccatccgccttaaaaacaggctttaagttactcaatgcctcaagcgttgtatccggacgaattggttcatcatgatctaaactttgaccatcaatctccacatccaggatctcattatcaaaaaatccggatttaactgctacagctgcctttttatgcgactgcaatgcaaattcatccatatcctgacgactaacatgatatttttctgctacgttttcggcagtaattcccatatgcttgccagaaaaagcatccatcaaaccatcgttaagcatagtacttactaggtgatctgctggatcatttttgttttcttttttaacaaaataaggcgcattagtcatgctctcactaccgccgacagctactagatccaaatcgcctagttccatctgtccttgagctagacgtaaagctttcagacttgagccgcagacttcattaattgtaacggctgcagaagcttcactcatccctgaatgtaaggcaacttggcgagccatattctcacctaagccggtatccaaaacattccccataaacagtgcttgaacatcagctggcttaatattgcccgccttcattgttcctttcaaggccattacacccaaatcaattgcagaagcatccttaaaaaatcctcggtacttgccaaaaggtgttcttttagctgcaacaatataaatgtccttcatatattttctctccattctccataatgtgtattttttaacaaatatgataatagcaaaaaaatattaagaaaaacataaaaagactacgccgcagcgtagtctccctaataattaagcttattttttattttgcttaccttcagcttcaaacttcttgctcaattgcatgatatatgcccgcaattgttccttaatttctgggtgcttcaaaccatattcaattgaagtttcaaggtagccttctttgttaccaacatcatgacgttcgcctttaaaggcatgagcaaagacacgttgagtcttgttcattgtatcaatcgcatcagtcaattgaatttcaccgccacgacctggtttttggttagccaaaatatcaaaaatttcaggtgttaataagtaacgaccaataatggcataatcactaggtgctttatcaatatcaggcttttcaacgaatgacttaacattgatcagtcctggcatgatctcattttccggttcgatgacaccatacttagaaacttcttcatgtggcacaggcataactgcaattgtagaagcatgcgtcttgttatagcgatcgatcaattgcttggtcaatggcaccttatcttccattaagtcgtcgcccaacataactacaaatggttcatccccaacaaaactgcgagcacggaagatggcgtctcctaaacctgctggatgcggttgacgagtgtaatacaagttaacgcctaaatcagtaattccttcggttaggcgaagcaattcttttttacccttttcttccaaatcttgttctagttctggattagaatcaaagtgatcttcaattgggcgtttgttcttgccaattacaattaaaatatcttcgattcctgactttttagcctcttcaacgataaactgaattgttggtttatcaacgataggtaacatttccttaggtaaagccttagttgcaggtaaaaatctagtacccaaaccagctgatgggataacggcttttcttactttcataaaagcacactttctatttcaattttataagttcatcataacaaaatatgcatttttcagctacttagtttttcgtcttttcttttgaatataactggcaatacgaccagcagaatattcaacttgtccaacacggtttcgcacaatagcagcgttaacaccaacgccaaataaaaataatactgctgcaatattcaaccagagcataaagatgataaacgtaccaacaatgccataattctcccaagtaatcgggaaatggtgtaaatagaaactaaaaagaaatgatagggctaaccagcctacaacagttacaaaaactcctggccaaattactctctttttgagttttatattaggcaaaacatagttcaaataccataatgctagcatcataaccaatattaatactggatagcgataactaaagattttgctaatttcattaagtggtagctgaaaaatcggtcctaaaaagttgagtacttgttgcccaaaaaccaaggccaatgtagcaattgtaaatactagaatcatcaatcctgtaaaaacaaaagtaatagttctagtccaaagaaaattaagcattgataattttaattcaacttgatgaaccccataaagtctattttctccaagacgaattgcattaaccatatttgataatgaccaaactgcaaacacaataccaaaagaaatatagcctgttgatgtcgttttcaataaagaatttataattggcataatgaattttgacacttggtctggaaaaaccaagttcaaatattcagcaataggcgcagtatcaatgtgaaacaacggtaacacgttaccaatgataataataatcggaaaaatagaaaacaaaatgtagtaggcaataataattgaactagcaaatatctctccttgagataaggtggttcgtaatgtagaaataaattgcccaatttttaaaccaaaatggtttttaccattttgcatccattatcctaatcatccatctcatcaaagtgagggatgtacttttctaagccatcgtaaggatgctgcagggtcaagatcttaggaccatcttttgtaattgcaaaggtgtgttcaaattgagcagcattagaaccatctggagttgcgtagtaaacccaatcatcgttaggatcatcaacagtacgttggtcgatgtgccagtcgccaccagcttctaccataggttcacaagtaatagtcatgccttcacgcaagcgaagaccatgacctgccttgccccagtgaggaacttctggatcttcatgaattgatggttgaataccgtggccaattaattcacgtacatcaccgtaatgattttcatcttcaacataatgttggatagcagcaccgatatcaccaattctgttacctaaaacagcttggtcaattccgagatacattgcttttttggttacttcaattaatttcttatcagcttcggaaatttcgccaactggataagtagtacatgaatctgattcataaccgttcaagttgcaagttacatcaaccttaacgatatcgccttcctttaagatgcgatcttttcttggagtttggtgggcaatttcatcgttaaccgaaatacaagtaccatacttataaccctcaaaaccttgttctgaaaggcggccgccacgacttgatacgaagtcttgacaaaactcttcaattttccaggtagaaatgcctggcttaatcacatcacgtaagccttcaaacatagttgcaagaagatgtcctgaagcttgcatgcctttaagttcacgaattgatttaattgtaatcaaaataatttctcctttataaatttttatttagtttcagatatttctattataccgttttccaaaatacttttaaaaggtcgggtttttgtagaatcaaaacaaaactctagaaatacctgaaatatttttaaagtttgctaaaactaaacgtttttgcaatagtttcatgtataataaggtgtcgtataatgcagtgaaaggtatgaaaaatcatgaaagcaagaattgtttatgccagcatgactggtaacgatgaagacatggctgatattttagaagaagatcttcaagattatggctttgacgttgaaacaagtgatgtcggcttcactgatgccaatgactacttagatagtgatctttgcatttttatcacctacacctatggtgaaggcgtaatgactgatgaattggcagacttttatggggagttaaaagacttagatctaacaggcaaacattttgctgtgatgggttctggcgataagacctacggtgaacacttttgtgaaaatgtttttgactatgaaaaagcattcaaggattgcggcgcaactgaaattactaaacccgtaacaattgaaaatgcgccagatgatgatgcagtcgctgcaatcgatcaagctgcaaaggaaatggccgataagttaaatggctaataacaaaaaagacgtcacagctgttgatcaggcacaaatacgccgtctaggtcaaaaattaatcaagcgacaccgtaatctttgggtttacatggttttcggctttgtcgctgcattaatcaataccttagtcttcatggtcttacactcatggtggcataatgtgatggtaatttctaacaccatcgccttcatcgtctccaacctggcatctttctggtttaaccaaaaggctgtttttatcaataatgtcgatcatgaacacagcacgtggcataaactaatcgtctttttcacttatcgcgtcatcagtttaatccctgatacattaattatgttagtcggcttatcctggctgcatttaaacgcattactagtcaaaattatcgaccaaattttagtcggtgtattcaattacttaactactagatcagtctttcaaaagcaagaacatactatgattgaacgtgcaaaaatgcgcattcaagaaccaaaaaataaaagagacagcaaaaattaaacaatgtcattaagttaagacattgacaaattatcgacttggacttttaagatcattcatttgcgatttatcgcatttgaatgctcttttttcatgccaaataaacccaaatcttgtttagaaattaggctacacgatataaataatatacagctgatttgggtttgagatttcttttgtcttttcgtcctggtctgatcggaattgtgtaatgactaatttgaataagaatctttttaaagatttcagttgaagaagaaattatatacatagcctggatgacaaaacatgactgtttgaaattgatcgcatattgatacttgcattttttttgtggtacatatgcttgagcatcaatttgactgactgcgttaaacataatcatgtgggcatagatctccatttcaataaatctatcctgcttggaatgaaactgtacgctacctaaagcatatttcaactttttgaatgaagtttcaatgccccagcgcaaatggtagatttctttgatcctttttaagggataatcggctctatttagattagttagaacaacttcccattcttctttgcctgatttaggatcattaattctaaatttacaggcacgaaattttattgtacataactctccaaagtcccagctgccatctttggtatttttagaccgatattttatatattgacggtaatgatggttaaccaaatgaacgttttctgtagccttatgggtttcataataataattagaggtagtcacccagcaagctatatccttatcacactcttgattaggcaactcagctacttccttaaatgcgccatatcccgttttagtacgtatgacataataacagttaggcaggcgattacaattttcaatcatgttaaagccggtataacctcgatccatagtaactatatatggtccgcaatttagctttttaagcatttgaacggcggctttacgttcatccatctttgacttaggctgaaagatgcagtcttgataagtattatttaacaggtcatagagtgcattaacatgaatttggcaatatggctttcctttatgattgagatttccaacgatattctctgatttaggattccagatttgattaaaatcagacccatcaatggcaaatatacgatatttatgatcaaataactggatattaaataaattctgattaaatacagttagaatatgcttaaaacatgcgggtgaaagctgacctttgcgttggacataagcggaagtactgactactttatcgttatttttaatagctttttggccaaaagctctaaacaactcactggtcaaatcttttccttgcatattaatagtagttttaatgactgtagctgcatctaaaaaccgcttcctagtgaaggcatgaggatcatcgataaaatcatgaatatgctttccagtatcattgataatttgatcaagacgatctaaaatatttctgtgaagggctttcataattaacaccagctttctggcaataattttgaaggtttaataatttaatcagagggcgaaaaggtaggttcttttcgcctttattttatgcaaaaaaagaaccaaatcataatgattcggttctacagagattagattcaatttgtcaatgtcttaacttaatgacattgaaaaattaaaactgtctctttatttttttactcaaaatcttttggtttactttcactatcttgattaaagtaataataaatatcatccataattcgatcagctgcatgtccatctccatatggatttttggcattcgccatccgatcatattcgtttttgttttctaacaaagctagcatttcttcacgcaccttgtcgacttcagttccaactaacttcaaggtaccggcctttacgccttcaggacgttccgtcgtatcacgtaaaaccaaaactggtttacctaaactaggagcttcttcttgtacgccacctgaatcagtcatgataaagtatgaacgtttagctaagttatggaaatctaccacatcaagcggctcaatcaaatgaatccttggatcaccaccaagcacttcattagccactttttgtactcgtggagataagtgaaccggataaataatttctacatcaggatgcgaatcaattacttgccgcattactttaaatactcggcgcattggctcaccttgattttctcgacggtgcatagtaaccaaaatcaccttattaccaggagtaattgcgtccattacctcatgatgataatcttgttgtacagtctgtgctaaagcatcgattgccgtatttccagtaacgaaaataaaatcagaatggtgattttccttcagtaaattagccttactcaattcggtcggtgcaaaatataaatcggctaaatcatccgtcatctgccgattcatttcttcaggatatggtgaatacttattccaagttctcagacctgcctccacatgtcccaatgtagtttgctgataaaaagtagctaaagaagccgcaaaactagtcgtcgtatcgccgtgaaccaagacaatatctggtttctcttctttgatcaccttagataaatcaatcatcactttagaagtaatttcttctagagtttgattttggtgcataatattaaagtcataatctggtttaattttaaaaatatctagcacttggtccaacatttcgcggtgttgtgcgctaacgaccgttacttcttcaaaacgatcatctttttttagtttcaaaacaagtggtgccatcttgattgcctctggacgcgttccaaaaacagtcattaccttaattttcctcattaaaaaattcctccgcttaactattttactatacctgattttagactatcttgcacccgctttctgtgttttaatggaagtattaaattgaaagttggtcgatgcatgaattcatcattactattattaattacaactggtttaattattttgattggaactttttgccttgtttttggtatggacaaaaacagacccgctaaaactagaaaatatttactttatactgcactaatctgtgttttcctagtttggggcttaattactgcaattatgcttcaacccttaggataataaagataccttttggataaccaaagcatgtaaaaagcctgcaagaccaatacttgcaggcttatttctatgaccccggtgagattcgaactcacctctacggtttaggagaccattgttctatccagatgaactacggggtcaaacctaagattaactttaccaaaaaaagtggtaatagttaacctttttttagaattgtggattaaaaaatgttttcggatggttggtatcagcaatcttatcagctgctttaacaaaaggcatccaaattagcaaagtaacaatcatatttaaaatgcttaaaacaattgcacgccaatcataattgcaagccagaaatgggccaataactggtggcatgatgctaggtactgccacttgaactggattaaccaatcccataatgctaacccaataagaaaaggcaacattaactagtggcgctaatacaaatggaattagatacactggatttagcactacaggcaggcccaagagaattggttcgccaatgttaaaaattcctggagctagtgagattttggcaattgtgcgataatcactgcgtttagaaaacattaaaatcgccacaattagcattaaggttccaccagcaccgccaaaccaggcaaagacatcaaatgagccacgtacccatacatatggtggaatatttccattactaatcgctgtgatgttatcattttgagcagtcatccaaattgaatccaaaattggtgatagaacccctataccattaattccaaaaaaccaaaataactgcactaataaagtaatgacaattaccgtaccaaagccttgtccccactttactaatggagtttgaattgtggtaagcaaccaatttccaaaatatttaccggtaagaatttggaacaaataattaattccgcctacaccaaatattgcaatcattgcaggtaataaagaatcaaaagcagcttgttcagcatggggcaagttcgatgtcacatgcaacataatccttgctttatagcaagcataataaataaaaaagcctaatgagccaaacaaaatagcagtaaagaggccagtagttgagaactgactaatgtcaaatgcattatgcagtgtaacattatcaccatgaaatttaatcttagctatattggcaatgcttagtgcaaaagaagataatgccacaattgaagcagcaagtctatttccttcaaaagcttttgctagttgatagcctaaagccaatgctaagaaaaaggcaaataatgaaaatgttcctcgccaaactaaattactgattgctaccaatggctgtatcgcaaaagcaaaggcataccagcctaaatgatcatgagctgcttcaattaagctcttaattaaaactgctaatgatcctgccattgtaattggcattaatgagacaaatgcatcccgtaaagcaactagccatcttatctgaccccatctactagctagcggcaaaacatagtcctctagccatctaactaaacgaatcatttctttcctttcaagtaatgtggatgatatcccttgttcttattacgtttcttgcgttttttagttttatttttcttagtcgaagtcttaatgggctgctctttagcctgcttcttttccttcttgagtttaggcttttcagttgttaaatgatagcctgcaaagtagacacgctctatttgtaattgatctgccaataatttcttcaaatcacgaaaatcgtgatcatcgcctaaggtaaccacataaccttcagcgttcattcgacctgttcttcctgcccggtgcatgtaagtattagtctcgctcggaatatcaaaattaatcacataggtaaggcctggaatgtccaacccacgcgcagccaaatccgttgctagcagcaatttcgtcttaccagtagctaggtcatttaaggctttttcacggcgttctttaccaaattcattagctaataattcgaacttagtcttagtatgcccaaaaataccagcaaagcgcatcatcgttttatttgaatcaaagaacaaaattcccttaaagtgatccaacttagtcattcgctgcaaaaattcaatcttgtgttgattgtctacttgcaaaaaataatgtttagtcgctgaagcttgttcatttctgacatctactaacaagaaatgacggttaaaaacttgctccgcatcccgtgtaatctcagaatctgttgctccaaataataagatttgactgtctggacccagattttgccctaatgctgataacaattccattttagtaaattctaaaatatcatcggcttcatcaataatcaaagtcttgatctggtttactttaattcgaccacttgagaagaagtcaaaaaaacggcctggtgtagctacgaccacttcaggatgctttttcttcagattgtcttcttgtctctttctattgccagcaccaaccaagctgacgccttttaatcctaaagcgtggatgtaaggattaattgcatgacgaatttgtacagctaattcagtcgttggcgcaataattaccacgctgttagcattacctggctgtgctttttccaaactaggaagtgcataagccaatgtcttacccgtacctgtcttagccaatccaaccaggctcgcaccattgcgaatggcatcatagctttctttttgaattaaagttggctggtccttgtgttctctaattaaaacttgtttgattttttcttgatacattattactgtgttaattgcccatacttttgcttatattgaccaacggtcccgttatacgcgtacatcgttacctggctttctaagcctgaaacattccttacgcgtccgttagtagtgtagcaccaaaatgaatactttaatttattcggtgccttactatctgatgacataaataacgtttgcggattaaagtaatgttgatatttatgatcaactttcaccatgactcttttgccagctgcttgcaataaagccgcaaactgccccattgaccgcaaatatctcgctgaacgagtagtcactgccggtacaattagaattggcagcgagcccgtattttgtcctacttgcttaaaaaaagtagcggtaatgctgcatcggagtcgattcattgctataggaaatctcactaccaaatgccaagttcgttcctaaaatttggtcacgataagacagatagttttcatcaaaatatgatctgccttgggttgctttcaaatatataaaggaaacgccattagattgcaatttatgtaaatcaacatagtcaatatcttgatttaactcaatcccaatcgcacttgaattagcatctggcggtaaagttgtttgccgcttaaaattgaaaaagccaatcaaaagaaatgcaatcgccagaattaataaagtcaaaatcgctggcaaagtatacttatgctgaaatcttttcatcggctaaattcctcccttaattattttaaccgaaaagcctatcaatacaaaaatttccgagactgtaaaatagtttgtgtaaggatgaatgattccttaaatttatttctttaaacattagaaaaaggagttcctttctcgtatgattggtttgaacaaaaaaacacatacagaaagaagaactccttcatgaatgattttaccaaagattttgctcaagctctattcaatccagacaaaataaatgatttattgcgcaaagagctacaacaggctgttaataacttgctagaagctgagttgactgcctttctaggctatgatccctatgccagaaatggctggaatactggcaactctagaaatggtgcttatttccgcaaagttgatacgcaatttggcccaattgaagtgcaagtgcctcgagaccgcaacggtcagtttcatcagcacacgctgcctgactacaagcagcactctgatgttttggaaagcacgattatcaagctctactccaaaggcgtaactaccagagaaatcgctgacttgattgagaaaatgtatggcagtcattatagtccagctcaagtatcaaatatttccaagcagatgctccccaaggttgaggcttatcacaagcgcaagctaagcgacaagtttttctgtgtctatttggatgcgacataccttcctttgcgccgagaaacgtttgagcgtgaagcagtatatattgccattggcattaaacctaatggacataaggaagtcattgactactgcattgctcctagtgagaacattgaagtctggacagagatgcttcaaaacatgaagtccagaggcttgaagcaagttgaactctttctttctgatggtgttgttggcatgaaaacagccttggccaggacttatcctaaagctcattttcaacgctgcctggttcatgtcatgcgcaatatctgtgctaaagtccgggtggatgaccgcgaaaagatcatgaacgaattcaagcagatacatcaacagacaagcaaaaaagaagctgcagctgtcttgcacaaattctatgccagatggaataaagcttatagccatgtcatcaaaggtttgaaggaaattgagcccgatctgctggtcttctacaattatcccaaacaaatcagagcttcaatttattcaaccaatatgattgaatcctttaacaacgtcatcaagcgtaaagctaagcctaaggcagaatttccaactgaacagtcgcttgatgcatttattggcatccaggcaatgagctacaatgaccgctatttcaaccgaattcataaaggctttggtcaggttcaggataccttagaatcttattttgaataaataattaaaaaatcaatttacgagaaagaactatttacacaaaagatttgacagtttcaaatttccagtcgatgtgctaaaatttaaataatgtaaacgaagggcaacaaataaatatgaaacgacaaatctcatttggccaagcattggctaccgtagtcggttctgtcatcggagctggcgtatttttcaagatcggaacaattactgcacaaactggcagcacttcaatgaccctgtttgtatggattttagctgggatcatttcaattgcatcaggtttgaccatttcagaaattgccgccagcttaaaaattaatggtgccattaagtatcttgattacacttacggccgcgtgtggggttttctttttggctgggcacaaatgattgtttattttccagctcaaattggtgccctaagctcaatttttggcgttcagtttgtctccttatttggaattaaggcgaggtattctaacctaatagctatcttgctagtgctttttctcttaggaattaatctaatcggaactaaattttctagcaaaatgcagtcggtcatcactatcctaaaaatcattccaattgctttaattattatttggggattatttaatcctgccaaaatacctgcaccaattattccgttaacagtcggcactggacattcatttccaaccgccattagtcaagggttactttctgcgttattcgccttcgaaggctggattgtagtgactaatttggctaacgaagtcaaaaatccagaaaaagacctttcacgggcaattattttaggtctttcagcaattacattgatttatgttttaatcaattatactttcatgaccgttttacctattgatcaattaactaataacaataatgccgcgtttcaagcttcaatgaaattgtttggtcaatttggtggaaaactagtcactgtgggaattttaatttctgtttacggtgcggttaacgcattcatgctgacagggatgcgcacgccttatatcttggctcaagacaatttattgccattctccaataaaattggcaaggctaatatccataccggtgttccagtagttggcgcgtttattgttgatgctattgcaattgtcatgattctactaggtaattttactgttttaactgacatgctagtcttcgttatgtggactttcaacacaatgttgtcagttgccgtaataattttgagaaagcgtgagccagaattaaaacgtccatttaaggttccatggtatccgatcattccaattatttccgtgatcggtggtatcttcatcgttgtctcaacaattatcaatcaatttgttctttcaattattggtattggtttaacattgttaggactgccaatttactattacatgcaaaagaaaaataattaacgaaaaaagccgccgattttgggtgactttttatttgagtaaatatatttcctgaattgtcaaattaagtgcaacagttaggttatgaagagatatattgcttgaagagtttctctgctgtgtgatattggaggattcggcgatatttgtggttaatggcatcagttgcctgttgaacataagcttttgacttgtctttcatgctcttgctcttagggaagaattgacgcaaaagaccattgcagttctcattggtgcccctttcccatggagaatatgggtgagcaaagtaaatctggcagcccttgatcttggtcatatccgcaaactcagagccattgtcaaacgtgattgatttaaaccaggcaggatgtctgtcaatctccttttgaagcagcctttggcatgtgcttgcccgatagtcaggaatcttgataactacttcaaagcgtgtggttctttcagtcaaagtcattaaagcaggctgattcttgcgtctgacgcctttaaccagatctccttcccagtgcagcggagcttttctgtcttcaatctctttaggacgctgttcaatggaattgccaagatgcttcttgtgcaaagcgtgaccgccatggctgtgatgacgcttgttcctgcgtcttttgagcttcataggcagatcaatattgcttatgtccagcaagccctgatcaatatagcgatagacagttggtgtgctgggacaagggtagcctggcatagtccttttgaattcaccaacgaactcatcgatgctggtggcatcaaatttagctttaaagcgtctggagagcattctcaaaaagacagcataatgcttcaatggattgcgctgatagcagtttttgcgacgcttctcataataaatctgtgcagtatcagcgtaatagtgctcatacaataaatagctgctgtctctttgcaggacacttccgcgtttgatttcgctcaagaagtcgacttatggcagccgacttcttgagcgataacagtacgggaagttatgccggaatccagcattgcttgaatttgtccacgttgtacgctggttaattgatgatagtgcttagaaatgctagaatttgaattggtcataaagatcttcctttcttgatttttcgtcacttcaagtttaggtcttcatggcctttttgtttaacacttagtgttgcacttcaattttaaatccggggagtaaatatatttattaatgttgtgaagcaccgctagttgcatcattttcttgatgatcttcataggcagtattggcagcaattcgaccaaaagtgaaaatatctgccaaggagttaccacccaaacgattaccagcatgaatgccaccagcattttcaccagcagaatatagaccatcaataatttgaccatctttattcaaaacatgtgccttagtatcaattactaagccgcccatagtgtggtgaatagcaggctttctcggagtagcatagaatggtgcaacttcacatttgaggcctaatacattcttatggaagtctggatcctcgccacgatcaacgtaagaattataatcctggatagttttaaccaaaactgctggattcattccaatttgttttgccaaatcttcaagcgtatcagctctaaacaaggttccagccttaacttgcgcatcaagtgactcttgggttgtattgtaagcagtgtccttaatcttatcgtccgcaatttgataaatcaaaccaccattttcgataactgccttagccaaaacatcccgttccgcaaattcattaacaaacctcttaccctttttgttaaccataatatagttagcaggcggagttacaacaccagtgaaaagctcaccggtctttggatcagctactggcattaattggataaagcccataccgaataagtctgcaccagcttcaagacctaagttaatcccatcgccagtaattgcaggtgaattagttgttgtactatcgtactatcgtctgcaatgtttggccaataggtattgtatttttgaaccatcttagtattggcaccaaagccacctgccgttaaaattactgccttagcatgcacagtcaaagtactaccgtcagcgcgtgtcgcaattacaccgcgtactttgccatcttcaataattagtttttcaacacgagtttcaagatatggatcgacaccatgctctcttatccaatcacccaaaacgtgaataaaggcataacctaatggctctactggcttatgacctctgcgccacaaaccaccaactggttctgtaacttgagaattatcaaacttaacacccaaatcttggagccatttaacagaatttaaagcattagttaccaattcatgtaccaaagcatatttaccatgaatttcgttaccttttaaatcagtccttttaccacctaaataagtttgaatttcatggagtaaagtcgaatcaaataaataatctgtaccagaatcaatatattctttgatttgtctttgtaatctttcaaaatcaaagcggtattctaaatcaatttgttcaattggcgtattagccaagtcttctaaagtctgtttttcaccaggaagagccttaaatttactttgccattctggttcagccgcattcattggaccaccagcacggctagtattaccaccgatctgtggatacttttcgagaacagccaccctttcaccatgttgaattgagcgaactgcagctgctagaccagcgccacctgcaccaactacagctacatcaacagtaatttcttcatcttctacctttgtagcagcgggcttttcacggtttttccattcggttgaatcgccgcctgcttcatcaattgcttcggctacgccatcaatcacaccatgactggaaatagtcgtgccactgaccgcatcaacgtttaaagtttgattttccacaattgttttaggcaaacgtctaaatacttcatcggctactcccttagtttcacctgatgaatctactttgattgaagtaactttatcgccatcaatgtcaacttccattggcattgattcggaaccatgacctttagcttttacttgatattttcctgacttcattgcttacacctctaataagtttaattttatccacaagttaatattagtgcgtcatctgttgatgtatcaaatatcaatttcactatactttcataataaaattgttatgagataactatgtttcgttctccaaataaaaaaagcttaatgcaaatagttatccacattaaactttttaattgcatgatttaattaataaactgaaacttgaaagctaagattaacgctccttccccgcgcctcttggctttttcttatcaaaaataaaaacgcaggatctctctgcgttatactttaagtgtcaacctgaaaagtaaaggagatcctacgcaatgaacagtatagaacaaatcgacacagaaaacgataccaaatccttaatttcttcatttattaatctaattggtctagctaagttgactaaacaagtcaactttaagcgtaaatctaccgtttcattaaccatgattatctcttggctgatgtctgtacattttgctcggctttccttattcagagctaagagtgacaagcgtttttccgttagaactgctcgcaatgtacttaacgatggaagaatcaactggcaaaaactattatgcttgattgcagctcggctcattggctgcttcaaacatccgtaaaaagaaacattatctttattcaagcatagttgaggctcaatatcatggacatatctttttattaaagctcgtttttgtctccaaccgtggaaacaagaacaagtatttagttttagctactactcagacaaagcttagacctaaagaaatcatccaactttatggtcgtagatggcaaattgaaacatattttaagacgtataagcaatatcttgctttagataaatctcaagttcaaagctatgatggacaatgtggctatatcgcagttacagcaataacttatgatctattggcctggcaggaaagacaaaatacagatgataagacaatcggagatttattctatctaatgaacgaatccttacctgatattagattcgtagatgcattggtctacttaatttcagaattaaaagagcttaaacagaatagttttgaaaagatagatgaagtaatcaatgactttattaaccaactgccacgattcatacaaattgcactgaaacagatcatataaaaactaattacgtctagaaaagctcaatagtgacaggacttgagcttgattttggtgctttcaagtttcagtatttaaattaagcttcagaggcgcctgatacagcatctgcttcttgttcatttgaaacagtaaaataattataattggtattatccgcagcagtcgtacctgcaacaaaaccagaagcatagctccaagaattcatcatacttggcattgaatcatgaccattagcaccaccaacaatttctcctgcagcatagaagttacttacgggattcatatcattgtcaagaagctgcatttgatcagtagtttcatatccacccaaagttgtgcagaacagaagtttttgttcaattacataatatgtatcgccttcgaactcatgcataaacttcttgtctctaccaaactcaggatcataatctgctttaacatcttcagtatagttatccacagtttccttcagcgtttgataatcaatacctgctttttctgccacggtcttcaagtcgcctttgaccagaactggactcttctcgccaaccaaatcaaagaatgattgaacctcttccttggtaaagccatacttaagcattaattcatagaaacggtcccaggttctttgatccatgacaatgtaagctaccttacccttttgttcagcaatcgcatccctaaaatgcgtataaggtgcagattcgttaactattctcttaccatcagtattaacaaaaatagcccccatatcggtcgcttctttagttgaataagttgttagcttagcaataccaggttcaacttccaatccatgtggatataccttataccagtctaagttacgagtaaccaaattcatatttttggcaaaatcaagataatcaccagttgaagtcattggaccataatatggaatatcagtcttatgagcctgataatcacgtgcaccccaaccaccagcagctaaaacaagtgacttgaaattgacattaattgtctggtgcttgccttcagcggttaaagataccagtttgccagccttatctttattcaacttttcaacacgggcatctaagataatttgtccgccctttttttcaaatgcctcagccaccttagccactagttcatatgagctttcactaggcatttcaatttgacgatatacactatgttcaactgtttgggtttccgctttttgataagtcaaatttgcaaattcagtaataaagtctactgccttcccaatattgttagctaatagctttgacaacattggataattagtaccgcggcattcacgagtaatatcttgaactagtctatttggcgaatccttctttgccgtttcaccaaataattctgcagaaactttagagccagttcctacaacatttgagccatttaaaatagttgctccacctaaatagccatttttttcaagtacaactacttttttacccatcgaaagagcacgacttgccgccattaacccggccataccggagccaattacagccacatcaacatttagttgcctttcttcatgtacgacttctggcttttttccgtcaagagcaatgttattttcggctaatgcttttttaccagaatctagcattgcttgagtcatcaatgatgccccagaaacagcgtccacgtcaaaactttgattatcaataatatttttctttaatttaccaaaagtttgattaaaaattgcaggagtttccgaattcttggttactttgacatcactaattttattgttttctaagtcaatctcaaaatcaatttgaccattgcgaccatctgcttgagctttaatagtttgtttggtcataaaaactactcctttacttgttctttttactaaaccgcttatattataaccacaatattaaatctaaaaaataaatttaatttgatattttaatagaatttttttatcaaaagcagtaaataaaagcgagtgatcattctcactcgcttgattctttatctaattttcatccttatttattagcgtaatgttgaataacttctggcttcaataccccaacataaggaaggttacgatacatatttaaaaagtccaaaccataacccactacgaattcattgccaacctttgaaccataatattctaattcaacatcggtagttcttctggcttccttatttagcattgcacaacacttaacgctcttagcgccacgtgccataatgtgttctttcatgaatttcaaagttaaacccgtatcaacgatatcttcgacaattaaaacatcgcgatccttcacgtcagttaccaaatctgatactatcttgaccttaccagttgactcaaagccatcaccataactagaaacatcgagaaaatccagttgatgtgctacgtccatttgtcgagttaagtcagtcaagaagtaaattgcacccttcaaagccccaacaactaccggctttttaccagcatagtcctcagttaattgcttacctaaacggacgcacatctcatgaatgtcatcttctgtgaataatttgtgatctataatttggtcaatattgtcgccttttgccatttaatctacccttcaattcaatttacatatattattcctaataaaaagaattataacatctttaaacaaaaaaagcgtcattttcaacgcttcctctgaataatttctaattttcatcctttgattgatcgtctttttgatctttatccttaatcggttcaacgataaaccagcgcataaagccttgttcgatactgtctaaggtaaacttatatccttcaagttcaattgattcaccctttttcaagttaggataatgttccatcatgtaaccaccaatggtaataatatcgctatcttgaaaggccttcagatctgtatggaagaaacgctcaaagtcatataaagtcgtcttacctgaaacatgaacttgaccatccttgtccttgataatgtaatcatctgaaacatcatcaatttcatccttaacagaaccgaaaagctcttcataaatatccttatcagtaacgatcccactagtaccaccatattcgtcaactactaagacaattggtgtgtgcttagaaatcatcaagtgcaagatatcttgaattggcattgattcaggtaccgtgataatagttctaataattcttgttactggtacgttgccatcaatttggctttgttgcacaatgtcgtacgcataaacataacccacaacgtcatctttatcattatcacgcacaactggaaaacgactgtagccttcttccaagtattttttcaaggcataggcaattgtatcagttgaatcaagtactgacaatcttgttctgtcagtcatgatgtccttagcaaccttatcgtttaattcgaaagctctttccatataagttaagtcttctttatcaagcgaaccaccatgaaccgcattacgcgacaacttgatgatttcagattgtgaataaacttcattttcttcatcagctggagtaaagcccatcaattttaagattccattggagctagtatttaatagccaaacgaatggataaacaatcgtatggaaaatatgaagtggcgtaacgatccccatcatcatcggtactggcttgtcaatcgcaatattcttaggcacaacttcagttaagacaacttccaaataagttaataaaactacgcctaagattgcactaactgacttgatgagtgaatcattcattggcgtcaaatggaaaagatcttccaatatggttgcgaatgtatcagccgagaaccaacccaagactacaccaaccaaagtggtaccaacctgagtagttgacaaatactcattcaagttgtgcgtcatatgcaaagcacgacgcaactttttcttatttccttgacccttagcaagcatatcttcgagctgacttggtctagtttgaactaacgcaaattccgcagcaacaaagaatgatgcaacgataaatattaataatgttgcaactaaattagttactatttgagctggactcaaagtattatcacctttttttacaaatatattactaaaacctattttaccatttcttgcctaaaatagtgcagttttacacaagggataacggttttttgtaatttattcgaccaccttgtaaatttcattaaacggtacacgctttggaataaatttaggatcattaatttcagcattcttgtcgatatagccaactgcaattgccattccgacagcttcatcatctggaatttgggcatattctctaaccaattctgggtatgaaaccattgagtgagctggcatcacacctaagccacggttaatggctaaaagcatgatactttgtgcaaaaattcctaagtcaaaaacggaccaagctggagatttcttcggaaccgttaaaaagataattgctggtgcattgaacattgttttattcgcatcattaaataattgaagcttatttctgaaaaagaaactttgggatgcacccatcgtagccatattacgacttggataagtatcccaatctagtgatagcattgaagcaaaatcttcatgtgcaacttctttatcatcaatctttttagctgaagcagccttaaacttgcttaaagcatcccccatcaaaacatatgcacgccatggctgagaattaagcaatgaaggtgattgctgtgccattttaacgattccagcaattgttttttcttgtaattttctattagtaaacttccgcgttacatgttccttttcataaacatccttaaaattcatttttcctcaattcctttttgcttatataataacaatctatattttattatagtaaaaaactgttaaaaagcttaattattgctcttttcttgctttttcttttctgctgcctgtttttttaaataagcactcattgcaagatcattttttcgcatagcaataaacgcagtaatggttaaagttaatccgccaagacaaatcacaagtaagccaatcggaaacaagaagtctgctcccttaggaataaatgatgccttaattacccagcatgctataccaattaacatcaaaactatacccacaatgactgccttagtgttcggtcgatatcttttcataaatgcccttctttcttaattaacattctaacagaaaaagcttagcttcaacgtagaagctaagccgaaaactagagaaatagtcgttaaatttttacatgagagaggggaaagttgactatttaagttcgatagtttgtactttttgggaatgttcaacactgcctttttcaatcggagtaactgacttaatcaggtccatgttggtgtagacaacgatgcagctgtcatcgtatcccttgtctgtaatcatttggaaatccattgtggctaagggttgacctttcttaactttatcgccttgactaacattcactgtaaacggagcaccttttagttcaacagtatcaagacccaagtgaatcaaaaactcaataccttggtcattcgtgataccaatagcatgtttagttgggaagagtgtggaaatactaccatcaactggtgcatagatatgattatccttaggcttgatagcatagccatcacctaacatcttagttgagaagacatcgtcttttacatcagtaattggcataatgtcgccgtcaactaccgcatctacttcaatacccttattctttttcttaaagaaattaaacataattaataacctctggatttctaaaattcaagtaataatatcaacataaagcttgcgagtaataaaccagctgcagtaagtgaaattgcgattattactcgactaacgccatcttgtgtcttcttcaaagctcttgctcgataaaaacctaagatagctaatactacgcaaagcaagttgccaacaaagagctgagcaatcatctgacttcccatcaagaagcgataagtctgtcgattgattaaaaactgcttgtggtttaacaacatatagtagcctagtatgaagtcaacgatagcaacgattgtactaatcgcaatcatcggctgcttcataatcatcatccgaatcgattgaccagaagcaccgcttcgtagtgcaatcatcgcccaaaacaatagtggagcaatgaaaagtacgtatgaataccaagtcaaaatcttcttagtatccaagtgcatgctttcggttattcgatcgataaagttgccaacttttcgtttactaattgcccacattgatctctacatcctctccttgactctgttgccaagctacatattcactaattaccaaatcaattaagaagtacgctggggtaaaggcaaccttcccgctcttaaagtcggcatcatcagtaaaggcaatcgttggaaaataaatgttgtgctgcactaatgaagctaatttattttgcttcaggttagtgaacgaaacatatttgaatttatcattcactagttccaacttagtgatttcctcattgatcgttttattatcacccgtaaacgagataataaacaaaacatcgcctttttgagcaaagcgtcccgcagcttttaactcctctaatgctgatggcaaaacagttgcatgcttgccaactacaaacaattcatgagccaaatattgtgcgattaactcttgttgccaaccagtagagtaaatgtaaattgtccctgcattatctaaatcgcgatacaagctattgaaatcacgttgtttgaaatacttcaacacgtctgaatttactttactaagttcccgcgcaaaattattttcaattttgattggtttttgcttcgattcggctaattcgaccaaatcaaatttaagctcactgtagccacttagtcctagctttttacataaccggaaaattgcggattcggatacataaagctttttagctaatttggctaagcttaatttgctacagtctctcggattatttagaacatattgaactatctgtttttcagaatcattcaacttatgactattgtcatagaccattgatctcaaatttgccataatacctgtgcccttatcaatatataatttatatattaatgataacacaagcgctttcagattatagcaattgtttcatttgatcaacaacttgatcggcatccaatccgacaacgatgtcaacctcgttgttatctttatgttgtacttcgtaagaatctgcgatcttcttgaattctgaatctggagcgaccttcttaggatcaacgacatgagttcttactctagttgagcaagcaatgacatcttgaatgttggagtcaccaccaagcaagtcaacgataccagtagctctttcaatataaggattatcttgttcagttgataccttagcgtcgccaccttgttgttgcattaaagtgttcatttcatcaagaacttgaggtacgtccaaacctacgataacttggatagccttaccgtggtgtacgacattgacagccttgtttgctttaaatgcggcatctgaagcaactttatttggatcggcaacagatacacgtaatctagtagcacatgaactcaattctgtaatgtttgaaggaccacctaataattcaaggtaagcagttgctctttcaatgtaagggtcattagcgtccttaccagcagcttctgcagccttcttagccttgtattctttctttgaaagaaggtgaacatcttgatcatcggcttcacgacctggagtaatgtaattgaacttctcgatcatgatcttgaagacaaagtaagtaataataccgaagataataccaacgataaattccatcacataggtcttccagtggtttggccaaagtggaatccagttcattgaagcgataccgatcgcaccatctgacatgaatcctcttaaaccaaaggcccacataactgtgttcatcgtggctgacaatactgagtaaactacccaaagaactggagcagcaaacaaataagtaaagtcgataggttcagtaataccagctaatactgaggttaaagcagctgggataagcaaagctgaagtttgcttcttcttgttcttcttagcagttgcgtagaaggcaagacagataaatggtactaagaataccttttcgttaccgtaaagttggaatccttcaactgaagcgatttgtgaaagtggtttagtacttgcagcgtattcagcaaggtgtttcaaccagtatggttgcaaaccgccggcaacaacggctggaccgaattggaatggaatgtataccaagtggtgaagaccagtaggaatcaatacacggttcaagaattggtaaatccaaacaccgataaatccactatctacgatgaagtgttgcatgctggtgatacccatttgaacttttggccagccccagcaggtaatgagtgctaaaggaatcattacgaagaatgctaaagcgtagacataagttgaaccttggaaagtaccaagccagtctggcaacttcttatcaaagtacttattgtgtaaccacactacaataagagcaacaaccaaggcacctaagatactagtgtcaagagtcttgataccagcaatgttagttaaaccatggttagtagcgttagcaacaatttggatcttgtcaaagttaggaataccaaaagctgcaccccagtgggtaagcattgcaccgatgaagtagttgtaagtcaagtaagcaataactgcttccatggctgctctacctctagccttgttggctaaaccgattggcaaacctacagtaaacaaaataccttcttggttgaacactgtccaaccaccagctgaaattgtgtcccaaactgagttccatgtagttcccgggttggcaattaaaccaaacagagtcgggttattgaacaaactacctaaagctacgacaatacccgcaaacgagaacagcataactgggacgaacatagcggccccaaaccgctgtattttctgcatcataatcgtttacctctgaagaaaaaaattaaatcaataacttattcttacatctacacctgcatctacatctttatttcatcagatcaagtcaaccgcaaggtgctcatacaattgacttttgccatttgtgcttcacacaaatatttactcctcaaaaatgttttaagataaaacgtccagttgatatcaaattctgaacttaactctatcttagtagctagcttacatttttatttataccatagttttaagctaatgtaagcgtttttaaaactatgacttattgtttcataaagttaagatgatatttcatttcatgaaatttatttcagcccttcaatgatgtatataccaatatttatacccctttattttgcttgtcgcgcctatgtttaatcatttactttacatacaaaaataacatgtcaataaatatgctatagacattctctatttatacacataaaatcctctgaaatatatttcatttcatgaaacgaaacaagtgataaaacctttttcctttccaagatgaactactttgcttactgaaataacacaaagtctggcataattaacggtaagttaaatgcacaggaggaattattatgacaatcaaatttattgcacttgataccgacggtaccttgcttaattcaacaggtaagattttgcccagtacaaaaaaggcagttaaaacagctttagaccaaggaataaaagttgctttatgttctggtcggccaatcgcaggattaaaacattttatggacgaattaggaattattggacctaatcaatatgctatcactcttaatggcgcaattacccgcacagcagatggcaagataatgactaaagatctagtttctaatcgactttatcgtaaaatgtatgcttttgctaacgagcatcatttaccttttaacgttgtttcccctgattcaaaaataattacaggagatcatgatgttgatttaatggtttatactcaagcttacgaaaatagtgcgactttatacattagagagctagatgaattgcctagtgattttgaaattgctaaaggttgttttgccactaaagctaagttgttagaccaatgggaggataaaattcgccaagaatttgggcaagagctgtatattgttcgtgccgacgattgcttcttagagctacttcaccctaatgttaataaaggaaccggattaaaagaattaactgaaaaacttggcattactccagaagaggtcatggcaattggagacgaaagaaatgatattaccatgtttgactttgctggaacagctgtttgcatgggtaatggctccgaagaagcgaaaaagcatgctgattatgttaccacttcaaatgacgaagatggcatcagcaatgcttttgagaaatttttatgaacaacctaaaacaagtatctgagaagtgattaatctttcctagatacttgttttattatttgttcaaatattcacgcaaagctggcaaaactttctccgcctcaactcgtccgacctcatacactcgtcgcatctcttttttatctgtttctaaagtgccaatttcaagcggaaacggtggacgaataataaaagcttggtcagcagcttcatcttttaccatctgatcaagcaccgcattataatcctcagctttagtagccaatttttttactactgcggggtatttccttaaaattactttttccagtggatagagcttactctgctttttgcgataagacttcggctgtgtagcaatgactacctttttatcacagttttgctgctctaaaaaatcatacggaattgaatcagatacaccgccatcaaagtaataatgcccatgaattgcaactggatgagcaaaaaatggaatcgacgacgaggctctaatccactctaagtcaacataacctgcatcatgtaattgatgataaaccggctcacctgttgcagcatcagttgcaacacaccaaaagtccattggattagtcataaatttttctttatcaaaaacatccaacttatcaggcaaaatatggtaacaaaagttagccgcatacaaattgcctgaccgccgccatgatttccaactagcataatatggtttccccgcaaagcgcatgttgtagcgcaatactcttcccttttgctccgacttcaagtttacgccaaaggcagcaccggctgaaacgccaattgctaaatcaaaggttatgtcattttctaaaaacacatcaattacgccagctgtaaacagcccacgcattgctccaccttcaagtactaacccacttttcatattttccctctttatcaaaaaagacctacgcttttcgcataggtctaatttattcttattttaattttacttcaagcccgaccattgccattcggttacttctggcatgtctttaccattgtcgcggatgtattggtggtgcttttcaagcaagtaatccatgtgactgatgaagtccgcattcttgcccttcaaagctgggatgctttctacggcatccttagctaggtcaaagcgatcaagatgattcaatacccgcatgtcaaatggggtagtaatatcaccattttcttcatagcagtgaatatgaacattgtaacgcttgcgagcaaaccaaatggattccatcatgctcttgtagccatgccatgcaaagattactggtacatccttagggaataatctgtcaaattcttcagttgacaagccattcttgttgtcctttggatccattaacttcataacatcaactacgttaatgtagcgaatcttgagatctgggaacttcttatgcaaaatatcaattgcggccaaagtttcaatagttggctcagtttcagttgaagcaaagacaacatccggcttagcacccttatcagttgaagcccagtcaatgtagcttaagcccttgtcaaccaacttttgtgcttcttcaattgagaaccattgtggacgaggctgcttagaagttaccaaaacattgatgcattctctatctttcaaggccttatcgccaactgccaaaagcgtattagtgtctgatggcaagtattcatgaacaagatctggacggttcttttcatacaagtgagtcaagatgcctggatcttggtgagtgtaaccattgtggtcttgttggaatacagttgaagttgcgacaaagttaagtgatggataatcatgacgccagtattgttccttagcctttctgagccacttcatatgttgagtaagcatagagtcaactacccggccaaaggcttcataagtagcgaagaagccatgacggccagtcaaaacgtagccttcgagaaagccttcatcttggtgctctgacaattgtgaatcaattactcgaccgctaggagccaggttttcatcatttggttcatgaatctctggttcccattgccgcttttgatcgtcaagcaattggaacagacggtttgacttggattcatctgggccaaagccgcggaaagtagttgggttgagcttagcaacttcatccaagtacttagcccattcaaccatgtcttgtgcctccatagaacctggcttgtcaaacttcaaagcaaatttgcggtagtctggcaagttaagccgcttaggatcaagaccaccgttagtgattgggttcatggccattctatgttcacccttagcagtgttttcagttacgatttccttaggtgaaccgtcttcattaaacaattcttccggcttgtagctttccagccaatcagtaagcatatcagcgtgttccatatcgccttgagcaactggaattggaatttggtgagcacggaagctgttctcaattgggttgccatccaagtccttctttggaccagtccagcccttagggcattggaagataatcattggccagtgtggcaaagtagcgtcattgttttcacgggcgtgcttttgaatagccttgatttcttcaatgacttcatccatggtcttagccatttcttcgtgaacctgcattgggtccttttcaccgtcaaaacgaccacccttaaagactgaaacaaagtgaggatcccagcccatgccacggaagtattcggttaattcttgatcgctcatgcgagaaacaatggttgggttagaaatcttaaagccgttgatttgcaagattggcagaactgcaccatctttaattgggttaatgaacttgtcactaaaccatgaagcagctaagggaccagtttcagcttcaccatcaccaatttcaacagcggcaataacatctggattatccaaaacagcaccagtaccgtgtgacagtgagtagcctaattccccaccttcatgaattgaacctggagtttcaggagcagcgtgagaagcaacaccgcctgggaaactgaagcgtttgaatagcttagccatccccttttggtcctgggtaatctctgggtaacgttcagtatatgaaccatcaagatatgagttagaaaccattacctgaccaccgtgacctgaaccctcaatatagaacatgttcaagtcatacttcttaagcacacgattcaagtgagcataaataaagttctgtggtgcaatagtgccccagtgaccaattggcttaggcttaacgtcttctgcaaccaatggggtcttaagaagagggttcttcatcaagaacaactgaccaactgacaagtagttggctgcgcgccaataagcatcaacgctctttaaatagtcttttgagtcataatcaactgccatcttattctcctttgagcatctaagagtgctctttttcatttgttcttttgtttacacttatatcataccaaattatctaaaaagttcaactatttttataattggatcctaccaattaaaaaataagtatttaatttaaaattgcatcccttttttgttgctatatcaaccttttaatgctttgatataagtatttagttgcttaaatactgataagtacagataaacaaatatcaaatactgacataatcagtgcaaaattattcattcatgttagattactaaatggagggcatgagatgacccaagaagaaagattaatacaaattaaacagttacttaaaaaaaagcaccaattatcaactagacagattgcagctcacttcaatgtatcatttgatacggcaagacgagatgtaattcatctaactgaaactggtcaagcaattagagttcatggtggtttgatggaaattaattgcaacagcgtacctgattttttagcaagaaatcaagtacaatcaccggttaagatgaaaatggctagaatggcaaagagatttgttcatccaggtcaatgtgatttcatcggttcatcaactacgttaaagcagctctgtccaatgcttaatggtattgacatgcagatcgtcacgaattcaatcgacaacgcattaagcttattagcaatagaaatcccatcagtcagattgttgggcggcgttatcaacaaaaagcagcgtttcatttattctgaaacagcattagaaacattgcgtcaaatccatttcaatactgcatttattggtggatctcgaatcagagatgacggcgtatatacaccaagcatggctgattccaaaattgtcgaaaccgccgctagtcgcgctaatcaagttgtattagttgccgaaaaatataaatttactaatcaatcctcttcgccatacatgtctgtccccctcaatcagatcgatgtccttattaccgacaccccattgcctgaggaattaaagcatcattttaatccaaaaacgcaaattatacctgttttaaaggagtgatagttatgttcagtctctttaaccaaaagaaacaaagcgaaagtcgtgaagtataccaagatttgaagaatttttataatagtttttttagcaatatctacaatgaaatgaatattggtcgctatcggcagattcgcgatgcaattgggcttgttcttaataagttcgacagtggtgatcatcctcttgaatacactagcaaattggtcatgtatattcaggctcgaattgccatgaatcacctgcatctaactcatgaacagcaagacctaatgaaaaagctaagtgacgctaccaaatatgtaaatctttcttatgtttatctgagtccgctcacttcggtagaacaatttgttaatatttaagtgtatctagaacctgctctagatgaaaaaatgaatccaaaaagaccgagtagctgatctgctcggcctttttatgcaataatattgttaaaagatatagattttttcaaaggaaataattatgacaaaattaccattcaaagttgttgctgtcgatatggatggcactttcatgcatgatgatcaaactttcgatcacaagcgctttgaccgcatcttaacagaattacacaaaaaggggattcactttatcgtttcaagtgggcgcccttataccagattacgcaaagattttgctggctttttaaaccgaatcgacatgattgctgacaatggctcgcttttgcttcaagataatcaaattattagcactcatttgctcacttataaaacaaccttagatctaataagttttatcaaagagcattattccaagagttcaattattgtcactgggatcaacaattcatatacaactattaatgcttctcctagttttaagcagacgatgaacttctattaccccgatcgaattgaagttactgatttagcagcggctatcaatccgcaggatatgattactaaaatcaccttaagttatcaatatgatttttccgcggaattagaaaaagaattcaaccaaacccatgccgagaagattcactgtacttctagtggtttcggtttgcttgatattgtgccttacagcgttaataaagggagcgctctaaaatacttcttacgctattttggtgctaaacccaatgaattaattgcctttggcgacggaatgaatgatgctgagatgttaaaactagccggttacagttatgcgatggctaatgcagaagatcaagttaagaaaatcgccaagtatgaggccccgagtaacaatgatgatggggttttagaggtgcttgattcatatttagctaaagtagagaaataataattactgtaaactaaaaccgtctgaatgagcaaaataaaaaagtagccaagttttcttaaactaattgacttaagaaaacacagctactttttatttacccaaattaacaaaggtattaaagttcatataatgataatgcacgcgcatatttgatacttcaaacggcgtcccatcatccaagaagaagatcccttccattacaccaacaggttcagtcggcttcaaatttagcttctgctgatcttcttcattcgatggttcaacagtgatattcaagaatgacttagtaacggtctttccctgttcatcttccaaatagttaaacaaagacttttgtaaagtctctggctttaattccggcacaattttaatcggcaaatatccagtctcaattaaaaatggttgttcatctaacagtcgcagacgcttgaattcataaacaaaatcattttcatttaaaaataagtcttccgcaatttctttagttgccttaatcacatgaaaatcaagcaacttaatttgttgttttttaccagggactttaaaagaatcagtgattccaagattcgatccatcataacgaaacattgcctgtttgcgcaaatatagtggattaataaaagttccactacctcgctttttaaaaacgatcccttgttgagccaacagctccagcgcacgcttcattgatgatcgacttacctgatagtgttcggctagactgcgttcatcaggcagtcgcatccccttatactgattattcaaaatattctgtttaatgtcatgcataactgtccgataaacataatctgccattattctcgtccttgatctgcctttttaatactatcaataaaccaagttgcaaacttatccaagtccacatctgtcgcaatctccgcattggcatgttcttggtccataaaatccattacgctggcaccataagtatattgcccgcgcaattcaatattcacatttgcctttttcattgtaaacatttccggatgaagcataattccaactgcagtcggatcataaatcttaattcgcggatcaccgtctggttcatgaatgttagagaaaagtgaatacaacatattacccacttcaccacatgtcttaactttatccatttgctctggtgttaaatgggccttatttccaatttcaagtggagcaaccttaactagcaatccactatgaaaaactacctgcgctgcttccggatctcccgcaatattatattccgcaaatgggctatgatttccgtgaccaatattaccacccataattacaatttccgcaatattttctttaacttcaggatattgcttaaaaagtaaggcaaagtcagttaatggtccaatgcccatcagagttattttttctggactacttttaatttccttagccatcaacgttgcagcaagaccaggttcaattaaagaatcatcagcttgttcaaattcaaagccggcaatccctgttttaccatgaaccgaagcagcactaatcattggtgccaccagtggttgattagcacccactacgacaggaaccttagtatgcaaaaacttttctaaatttaaggtattttgcaaggtatatttcagtgccacgttaccccaagtaggcacaatcatgcgcacatcaagttcttgtgcaaaaagactaatcgtcatggcagcaatgtcatcaatgccaggatcagtactgataattaaaggtttcttgttcataaaattatcctctcgtattaagtacttttataatagcaaaaaaccaaccaattaagaaagtggttggttttattctaataattatttttcttttttgggtttaatacgttgaatgtgttcttcttcatggtcacctaatactaatggcacacgctcaaccacagtatcggcatactccagtccgaaccaagatgcagggttagaagataaattctgcagccatactcttgcttcaaccatgaacttttcatagcctgtcaatttagttaatggactaattacgtcgttaacaattacaaaggcgaagtcccctacatcacgacccggtgtagtagtgaattgttgtggttgagcttcaatcgttccatcagcgatcaaatcatgaacaatttgccgcaaataaacatttacactggtttgttttctaaaacctaaatacaactgaacgttaattacattcttagtaccataagtattgaccgcgtattctgcagtatatggctcgttagtaacattaacagttacaaaccagtaagccttagcccgtttaggtctcttatccaaaattgaataaagcatttcgcgcttaatgaatttattatacttaaccttagccatataaactacattcgtagcgtaaactggataatcatcacagtggctcaactcagtcaacatatctgtatattcatctaagcgaacataagcattctgctcctcacgcttatcacggatcttattgccatagaaccacacgtacatgattgccaaaataaaaccagcaattaaaacagtgacgtaaccgccatgcaaaaacttagttaagcttgagaataagaacatcccttcaataaaggcaaagactactaagaaaatgcatcgtattgatagcgcggtaccttttttacccagatattcaaataataagatagttgtcatcaacatggtaaccgtgatggccagaccatatgctgcttccatatgatgtgaagttctaaataagaaaacaattgcaactgtaatgacacagatcatcttattaattgaaggaatataaatctgtcccttctcatttgaaggatagataatattcattcttggtaaaaattttaaactacttgcttcagctactaaagtgaatgaacccgtaatcaaagcctgagaagcaataatagcggcaatcgtagccaaagcaatagcaaacaatcttagactacttggtactgcttcaaaaaatggattgaaatcaccattaccagcatgataattagcattttgtaaaatccagacgccttgccctaaatagtttaaaatcaagcaaacaaacacataaggccaagagcccataatattacttttcccgacatgtccgacatctgaataaagagcctcagcaccagtagttgccaagaaaattgaacctaaaatcaaaatacccactttattagcaggactaaataaaatacgcaaagcatgaattggattaattgcatcaagcaaactccaatcatggcttaagttcataaatccaatgagccctaaaaaagtaaaccacaggagcatgattggaccaaaggccttaccaatcacactcgttcccattctttgaattgaaaatagtaaaaccaggataacaatagtaatcaagataaccatatcttgcgacgaaactggaattacatcaccaaagcgcatatttttcaatccttcaattgaagttgtaacagtcacagctggagttaatgtcccatcagctaacaatgctgctccaccaattaaagctgggataactagccatttagccctctttctaaccaatgcataaagagagaagatccctccttcaccatgattagtcgccttcaaggcaattatcacatatttgaccgttgtcaataatgtaacagtccaaaaaatcaacgaaatggagccaacaattagttcacggttaacattactaatcccaccattttcagtcacaatcgacttcataacatacaaaggactagtaccaatatcaccatagacaataccgatagcaattaaaaggccagtaaaagacaccttttgcttaccagatattttattcataagtttttatcctctatttcacttaaaaattgaaatttttactagtatagaaaaagtctagattttttgcaataaaaatatatctttttgaaaaataaaaaagaagatgaaatctccttcagtcacttaatttactttttcttatcttcgatggtgccatcactatgagcaataattacttcgtcacacatatccaggaacaagccatgttcaactacgccaacagtatgatcaaggtaatcagctaaaccatgaggtgctggaacaggatctgcagccaaatcaataatataatttccatagtgagtcacataacgttgattgccatccatacgccaccgaggctttaatccttcttgttcaaaacgtttaaagttttgttcacaagaaattggtaaaacttcaactggtaatgggaagccgcttaaacgatgcactaattttgattcatcaacgatccaaacgatcttcttagaattgattgctacatttttttctaaagttaatgcaccaccgccgcctttgattccatccaagttatcggtaacccgatcagcaccatctacagttaaatcagcttgatcaatatcggccaattcactaactttaaagcctaagccctcaagttgttttttactacggttactagtagttacgatagccttcagttttaagccgtcttcatctttgcgcttacctaaagcatcaatgaaaaaggcaacggttgaacctgtaccaacgcccaataccatacctgatttaaccatggcagctgctttttctgctgcttcttttttcaaacgatcttgttcttgcttgttcattattcatcatcctccatcgcctgtttaacttcctgttcagttggaattgaaggctgagcacctaaacgttgtacggcaattgaagatgcacgacttgcaattttagctgcttcttcaaagttagataggccagaatttaaattgcttaccaaatatccaataaaggtatctcctgcaccagtagtatcggctgcttcaactttataagtcggtattaattcttcaacatcgggagttgaaatatacgcacccttatcaccataggtaataaccacgttttttacaccaagcatgtgtagtttttctgcattagtggccagcgttgaattatctttaattgcaatgccagtgatcttggcactttcagtttcattcggtgtaatgatatcagtatattgcagtaattctttaggaatctcatcaactgcaggagctggatttaaaatagtgatttttttggcctttttagcaatcttaaatgcttcaagcgtcacatctagtgggatttcgaattgagcaattacacaatcccaactcttaatcaaatcaccagctgcacggatatcttccactgtcagttcataatttgcgccgtgatcaataatgatgtcattttgcccagcttcattcaacgtgatataagcatggcctgtctttgctcccattgtggtttgcacataagttgtgtccacgccataactcttgagctgatgcgtgataaaatttccttcactatcttcacctacacggttaataaagtaagtttcagctccacttttagcagctgcaattgcctgattagcacccttaccgccaccagcagtagtaatgtctagcgcattaattgtttcaccaggcttaggaaagtcttttacatgtaatgttgtatcaacattacttgaaccaataactacaatcttcttcattatgagcatcctcttctaaaaatggatttattcaacctcaattataacaaaaaacgtattcaaaatattgaacacacatttttgaaatcttactgtaaaataccaccattaacgaagccttttaagcgctcagcttcccacttcaatgtatctgaatcgtcaacttgcgagatcttatacccaacgaaatatggtgaagcatagaatcgtggaataatcttgcaacaagtaccttgaccatcattaattggatagaaaaataagttataagaatcaacaccatgtgacaagactgaacgcacatattgtgtgcccttttgaatcaaatcggcccaagtatccaaattagtattatcatgtgtcaaaatatttacttcttggtagccttgaactggacgcgctgataagttcatttcaactgaacccgaacgcccgacttcaaatcctttaaagttatcagcgccaatatcgtgatagccatctttatgatataagcccacgatctgcatatgtggatgagttaaagaaccatcagacttgggaccaaaatttttataccaaagcacactctgataacggcctgaattattcattttttgaaaacacttcaagccaaacttcatcaactcttgattatcttcacgcgtataagttgaaatatctccctggtgatcacttgattcaattaaaattgtttgattagtatcctttaacgtagggtacttattcttcaaccaaatcttatcgccatctttttcataaatattaattagatgctgcacatcacaaaaaggacagccagcattctgatttccttgccgattaccataatcataatcatatggcttacgcttaccaattgaatattcatacactaaaggattcttgtccatatttttcacctgctaaaccaaagatatcatacatttaacatcattttaacaattttatcggttaattgtgaacatttttattaataaagctaggaatagtacgtctatctatgataaactacctttgtaaaagaaatacatgatatacatgagaggaagaatcatgaaattctataaaaaattggtacttactggtgccgcagctttagctgttctaggcttgagtgcatgttcaaataataattctagttcatcttcatctaataagaagattccaactaagattaacaagaagactaccgttaccttttggtattcactaactggtaatgcgcaaagcagtttgcaaaaattgactaaagattttgaaaagaaaaatcctaacattactatcaagttgcaaagccaaggcggcaactactctgatttacaatctaagttggtttcaggtttgcaatcgccaaaggatttaccgacaattactcaagcttatcctggctggctttacaatgctgccaagaacaatatgcttgttaacctaaccccatacattaacaattctgaaattggctggggctcatatgctaagagtggcattaagaaagctctttgggatggtgcaaacatcaacggtacacaatatggtgttcctttcaacaagtcagttgaagtacttttctacaataagaccttacttgataagtatgatgttaaagtcccaactaacatgagtgaattggcttctgcatccgcaaaaatttaccgtgaaagtcaccacaaagtacgcggtgttggatttgatgctttaaacaattactacatgatgcaaatgaaggaaacttacggcaaagacttcaataagaacttaaactttgctgccaaggattccgttaaagccatcaactactacgctaatggagtaagagccggctacttcatgcaagctggtactgaaaagtacatgtcaactccattcaacaatggtcgcgttgctatgttcatcggttcaactgccaatgaagcttaccttaagcaaggacttaagaagggttacacttatggtgtagctgctcgtccaagcacgatgaacgtacaacaaggtactgacatttatatgttcaaaaaagcaaccgcaatgcaaaagtcagctgcgtttaagtaccttaagttcttaacttctaagtcatcacaactttactgggctaaacaaacaggctacatgccagttaatactgctgctatcaacgacaaggtttaccaatctgccaagaacagcaagataccagcaattattgccaagacctctaagaacctttacttcttaccagtaactaagaatgctactgccgcatatgatcaagttaatgctaacatgcaaaccattttagctaaggcaagtaaaaagcaatcatggaatagcgatatcaagactggtaaagataagcttgatgctgcttggaagcaataatttttcaaataaaatatctatcaaaaaaagaagttcagtattaattgaacttcttttttttacctaattatttactaaaaatggatattgaatttgatcattatcagttacattcaacttgtaacgagcacgatataaagccttttctaccgctaattgccctgcagttgtggccattgcaatcgaatatgacttgtgtggtgaattgatcaggatttgactgatagaatgcttaatgtatgactggattagaatgacataattcgattccttacatgcacgtaaaacattagaagcctgtttcatctcgataattcgagctactccattgtgtgcttcaatcaccttagccaagttagaggttaagctcttgtctcctactacaacggtaactcgttttttatcgaggtcaaaatcaattcgggaagcatagtcttcattttgcttttcagacgactgcttctcctttttttctaattgatgcaataaagacttgtgtctacctttagtcttgtgcttttccgtttctttatttttatccggcttttccttcttttctggaatagtaacttcagcttcggcataacgccatctaaccctaatgaaggatggatcactgactcgccaaacaatactaatcaggtcattttcgtgtaagttaaagtgacttacagtattcatgtctaagtataaaatagctttttcaggatttacttgacttaggtttttgccattagagtcctgcttgatgtataaaccaaaagaatcacggtgaactaccgctggaccaaattcgataatttcctcatctggcgcaaaagactttgcatgatgctcaactttaataattggacgattgccactgtcatttaagtgatctagcaaagtaactgtatcaccgttttccagcttttcaattctagtcaagtgttcattaaaatattgtactgaatgaccattctcatccactgcttctgcacctagcagcttacgcctaatctcatattgtttttcctttggtttagccacaggaattattttcttaaccacaggcttaggaataggagttatggtcgcatatttgtttttattctttaaaaccgtaggactcagagctttagcagcttcttcttttttagctttttctttttcaagctcttccttcgtttttttcggctttattttttctacagtattttcatcattttcttttttagtttctatttcagttttattttctagcttattctcagtttttatttctggctcattttttacagcctgatcagctttttccgcaattttaacgacttcattcttattctcaggtggattgcctagtactgcctggttatatattttactaataattttcaacgcaatcattgactgcttcagtgattggggatcgctccccgtcgcctgcattaaatcaataatatcttttctataatcaatcgtcatatatttaccttcttatttcttaaatatgaatattatacaaaaatttttaatgctaatctaattctttatagatttttatattatttttcctgtaaaaccattataataaaagtagttaaaatatcatttattaaatgagggagactactatgaaaaagaaacttttacttttcgtatcctttttagccggtttattgttcttggtatctacaccaacttatgctagcaagcttcctaaaggctatggtattgctaaaacctttaccacaccaaaagcaacccgtggcacctggtattatcgcgaaaagggtgataaaacaatttctaaggtaaagatcactgctcatagcgtagatggtaaaaagctttacgtaccttcacaaaagttcttcgagaaaaatgtttacaacgtttcagctaagaagcgtaatcagttcatcaaaaaaactgaaaatatttatgctgcagctaactataaaaagggcttcaatgtcaacaattgggttaacttagctggtgatggtgaatactacatccctgttactagaactgttaacggcaaaaaggttaaggcattaagaatagctactggtgctggtccttatactgctgcatatgcatacaaaactaaggcattggttaaataatcattgtctaacgaaaaagcaaattagcataatttgcttttttcttttaccgatttttacttttccgtatttctccttcaaaaagagcggtcaattttgccaaactcttatgatcaggatagcgttgaactaattgctcaattttatcggtagctaatttttttacttcttcggctgagcccattttctctaaaaaatctgccaaatcacctgaacgagcaagtaacttacgctcactacgactttctgccagaaaagcttgatcaaccttacgtaacttcaaactaccatctgcattaaagtgatatcctccccacatatgctgcttaattggttgcatcggttcgctatccacataacacaattttcctaccatatggtgcgtctcagtaattcctaacgtaaccgggtcataaatatcgacatagttaaaaattttctcccgcattttagccacctgacgtcgttctgttggcgttaataaaagccaaatattggttccttcatacagataagcagctgcaattgcttctggatgacgacaattagctaaagcaaactgagcattaattgaacctaacgaatgaccataaatataaattctactacctttaaattgattaattgtctgattcaataagtgagcagctgactttaattggctaggaatcgtccgttttcgtgcaagcagtgcttttaaaattggtagattagttttaatccattcatcacgccaagtttgtggagtcccctttttaaaaccatatgatcctttaaataagattgttatttcattcggacttgaaatgacgaaggctcgcatcccatccttagcataaacattacgacaaacagttccaagataatgttgatctattttgatagtatcacccagctgcaattcatcatatgtctttttagttaattcaactcgttcacgatctgttaactgtgcatttacactcataatttttcctaaaataaaaaactaactcttactattatgttagcatgagttagtttttttggataatttgagcctttaatcatattttttctgcaagtaatttgcaatcgttgacaagcagaaacagacaataaagtacatgattgcaataatcacatacattggaattaagtaagtcgtgttctgactgtaaataatttgtgcgtggtataaaagctctggcaaaacaatgatagttgccaatgaagtatccttaaccaatgatacaaattgtgataataatgccggaatcatattgtgcaaagcttgtggcataattacatgatacatagcctgaccatacgacatcccgttggaacgggcaccttccatttgacccgaatcaactgagccaattcctgaacgaacaatttctgctagcattgcaccttcaaagatgactaacgctgcaattgaagctgtcgttggattcgttacaatacctaattgaggtaaaccaaaataggtaaagaagatgatcaacaatagcggcaagtttcgaataatatcaataataaagcctacaattgcagacacatacttaattttcatgtagcgaactaatcctaagattaatcctactacgaagcttaatgcaattgaaattaatgaaacataaatcgttacccaaagtccttgtaataagaagcgaatatcgacccatgaatatgcatgaataaaagtttccattctctatccccttcctattagctgactaattttttctctaaatgacgcatgtagtaactaagcggcaaagtcaagatcaagtagaacaatccaacaataatataagtatcaattgtttggaacgttgagaacgcaatcaattgtgcttgatacatcaagtcaaaaccggcaacaaaggccaaaactgaagagtttttaaccaagttgacaaactggttgcctagtggtggaatcactatcttcatcgcttgaggtaagatgacataacgcatggcttgcacataggtcataccgttggagcgagcaccttccatttgaccagttccaattgaattaattcccgcacgaacagtctctgcaataaacgctgatgtataaagcgttaaaccaattgtccccgcttgaaatcctgacaatttcacaatataacgtggaacgatcaaataaaagatcatgacaattaccagcaaaggtatatttctaaaaatcgcaatatagatcttcgcgatcacttggccaaatttagatggtgctacctcaagcaaggcaaaaatcacgcctaaaatcaaactgaaaactagagcaataatactacttaaaatagtattccaaaaacctgttaggaagctgccccagttgttagtaataatttgccacattatttcaaaaccccctttagactaaaaccaggaattccagcaaaccactttttaatcaaacggtcataagtaccattcttttgtaattcattcaaagcttggtcgatatgatcagccatttgtttttgtcccttattaacagcaattccgtaaggagcattactatagacgccgccgactaacttataaccaggattttcttgagcgataccggcaagcaagccgttgtcagtagttaatgccacaccttggttagccttcaatgcagacattgcttgaccatagtcatcatattgcaaaatccgcgctttaggggcatacttatgtacatcatcaactgcggtagttcctttaacggccaaaacagttttgccttccagatccttaacattcttgatcttactattattaggcactaacaaagatgaaccggctggaaagtatggcttagagaaggttacttgcttggcacgttctggtgtaatagtcattgtggctaaaacagcatcaacatttccattttttaaaagtgggattctagtgttggcagtagtagtaacaaaatcggttttagcatctttacctagcatttgcttagttaaagccttagccaaatcgatttcaaacccttcaatatgtcctgtcttaatgttcgttaagccaaacaatctagtatctgctctaacgccccaaacaattgtcttactttcttttactttttgataaacattattgctagcatgcttgccacaagcagtcaaggcaagtgccaagattagcaataagggaaagaaaaaaaatctttttaattttttcatggcgtgccaccttaatctttagaaatgatcttgcttaagaattgacgtgcacgttcagtatctggatgagcaaagaattcttctggcttgcgatcttctaaaatatgacctttatcaaagaaaattaagcgattgcttacttctctagcaaaacccatttcgtgggtaaccacaaccatagtaatgccttgttcagcaacatatctcataacttctaaaacatcttcaatcatttctgggtcaagggcactagttggttcatcaaataaaatcaccttagggtgcattgctaatgatctagcaatcgctactctttgtttttgtccaccagataattgatgaggataagagtcaattttatcggccatacctactttttcaagatattgcatcgctactttacggttctcatcatcaggacgctttagcacaatcttaggcgccagcataacgttctctaacacagtgtgattattgtagagattaaagtgttggaataccatcccaacatttttacgaatcttattaatatcggtctttttatcagccaaatcatacccagttacaattaattgaccgctattaattggttccaagccattcatagttctaattaaagtactcttacctgaaccagatggaccaataattgaaaccacttggccttcatcaatctttaagttaatatctttcaatgcatggagctttccatagtacttatcaacatgcttaaattcaataattgctgtcatggcttctacctttctttcctttgtctacacaatataattattttactcttcttaaagctaaaactaaatattttagcaattcaaaatagtataatagcctgctaatcttataaatttgttcggttttagcaaaatatatttgtatttagctagattaaaataatcatattaacgctacttacgaatttattaactactaactttcaggataaagaaaaagcccatcatcccctctagtttgggacgaaaggcttttttccgcggtaccacccacattgtctaagtatagaccaactcatgaagcaccgacatgcttcaccggcgtggtaacgtaccggagacgtctcgacctactataagaattgttagttcggtgagctgctaaaagtgtttttcaatagttcagggtctgctggcttttcactaacaccaactcactgctaagaataaactacctactcgtctttttcatagccttttaatttatttatatgtatttaacattatttttcaagaaaatgcaagggaaaataatttaaatcgcaaatgtatccgtttttaattaaaataaatgctgttaatattcggaaaatagcttagaatattagtgatacctagaaaattaaaggagtttgatatgggaaagcttgaaaaacccgttattattggaattgctggtggttctggtagtgtgaaaacaacaatcgcacacgaaattgccgataacatcgatgatcaagatcgaattatgatcatgacgcaggattcttactacaaagacaatactggcgtatcaatggaagaaagaatgaagatcaactacgatcatcctgatgctttcgatatgccactacttgaggcacaattaaatcaattgatgcacagaaagccaattgaaatgccaacttatgacttcactgctcatcccgtagtgatgaaactattcacgtcgaaccagctgatatcattattctagaaggaattttggtactctttaacgaagatatccgcaatttaatggacatcaaggtttacgttgatactgatgatgatatccgttttattcgtcgacttgaacgtgatatgaaagaacgcggccgctcacttgattcagttattaatcaatacttgggcacggttaagccaatgtacaatcaatttattgaaccaaccaagcgttacgccgacatcatcgttcctgaaggcggcgaaaacgatgtggctatcgatatgttaactactaagttgcaatcagttttaagtgaataattatcgagatataacaaacaggcaagctaggaataatacctaacttgcctattttaatactctaaattatcttagtttttcttatcatcctgtgcattagctgcatccaaaatacggttatatttcttagcaaagaataccaaaagcaaaacactggcaataacataaataaccgctgcaatgtagtaagcattagcataaccatcttgcgtattaaacaagtaaaattcagtgaagagaccatcaataactccaacgatagcataggcaatttgaactacaccagtaaaggctggacgcaagtccttgtcaacaataaccatctgaacttcttgctgaatcggcatcgtggcattggctaaacctgttctcaagaaaagcagaattgcgacaatgacgaataagaaggctccgctacctaaccggcgaccattagctaacaaaagcataaccggtacacaagttaatgtacctgcagcaaccgacacgattgcaccgagtttcttttccaaaaatggagcaaagaagtaaccaattagcattgctgcttgaacaaaagtgttgatggtagaagtaacatcacgtggaatgtgcaaataactattcaaataaattggcacataaacggcaactaaacgagcaccaagttggataccggcaatataaacaatccacatcaatgtcttcttgctcaaaagcttcttatacatggccaccttttcaactctgctaggttctttatcatctgcagtagaacgatagtcacgtggtacatcgtgaataaatagggctaagataaaggctaacatcgttacagcagctgtaatataaagtaaaattctgtatgaatttgtatagtcagctaaagtttggccggttaacatttcagaattacctgatagaactgaagcttcgtgataaggaatccctctaattaagccaaagaaccaaacaacagccttcccacctaagaaagtacaaattgtctgcgtaatcaagttaacaatcataacggttgagaacatcttagttctaatcttccctggaacatatgaagtccacatcagtggatacatcaaatcataaaccccaattgctgtccaagaaatagtataagcgatcatgatgataatttgattggttgtgatacaggttaaggccataaaaattgccgtcattggtggcaagatcagcaaaatctttcgatagccccatttatgaaccgtcgcaatcatgactgacatcaaaattgctgtcgccgcattaaaaatgtttaaacctgaaatcaagtgtggcgctacaatcttgtagtaagacaaggctgcatcattcgtaatccctgttactgcacctaaaataccataaatccataagtagacaatgacattgtgtttataacgtggattccaatttttaatcgcctcatcctcagcttccttttccgcattgcttcgtcgagccatataagtccccttccccttttatgaaaacgtatacaaatatctaatttaatcttagcacctatatagtattaataaagtgtgtgtatacgaaaaggtattgattatatgacttaggcaagccttggctttaatgctttatcaaatagattagtaatcaattttactagtacaccatcaaatactaatgatgaaatcatgctgacaataaacatcaaaatttggacattaatttgatagtgactccaaccaaataagaagtagctgggaataaagccacccaaattagcaaaaaaggcaccggtcaagacacttttccaagagaatctttcataacgttcctttttagggaaaaagccaatttcattcattgccccctgaattaatccttcaaaaattgtcaaagctccccattgtccgccgatcgccatttctacagtcgcagccaataattcaccgattgttcctgcacccttagtcggtacaaaatacattgctagtggtgccgccatgtaccataatcctgtaaaaatattatccactactggtgcataacccgtgggcaaaaaactcaatttcaccaagttatacacattattaaaaccataagtgtaaatcacgcccatgattattccaattaaagccactaaaataattgactttacattccattttgacgatctagtaaacataaaaatgctccttactaacatactgtcagtaggagcacacaaataaaagttaattctcttgttagcactttcccttgcgcaagtattatcttgttcaggttcgaagggtattatctcagcattacgcacccctagtgacatttcatttatttatcaattaagtcaagtatagcacattgttaatcaaatgccatttgatctgtgtaaagtttgtaataaaatcccttttctttaagcagtgcctcgtggctgccttcttcgatcacattaccatcttttaacacaacaatcttattagaattcaagatcgtctttaaccggtgagcaatcacaaagcttgttcgtccagcaatcacagtatccattgccttttgaatcttttcttctgttaccgtatctacgttagaagttgcttcatccaagattaggaatggtggattcgttaaaattgtccgagcaattgacattaattgcttttgtccagttgaaaagattgagctagcatcgctaacttgagtatcgtaaccatcaggcaaagtctcaataaaatcatggatattagcctgcttagccgctgagatcacttcatccattgaagcattcggcttaccataacgaatattgtccgctacagtaccagtaaataagacagagtcctgcaggacgatcccaacattatttcgcaatgatgttagttgaatatcacgtacatctgtcccatcaaaggttactttacctgaattaacatcatagaagcgatttaacaggttcataatcgtagttttacctgaaccggttggtccgaccagagccactgattggcccttatcaaccgaaatatttactccgtgcaaaatttctttatctttattgtagccaaaatgaacattttctagcttgacaccatgattcaaaccactaatgaccttaccatttggcacttcgttttcatctttttgttcttcaactgtagctaatcttcttgccccagttaaagctaattgaatcatggaataaattgaagtaatttgcgtcaaaggttggaaataaacttgtgaatattcaacgaaagttacaatcaagcccaatccaatagcctgagaaatttgaccggaaataatcatccaagaccccatagcgatgacaattgccaaattaagtaagttcaatccgttcatcaatgggaataggattcccgaataaaattgccccttaaacaaagcgattcttactttattgttgtagaccttgaagccatcaaccgattcttgacgcaaaccattggtaataatcaccttttcaccattgatctgttcggtaatataaccatttaaatcgccaatttcatcttgctgcttatcgatataaacgcgagcttttttcattaaaaggacactaataatcaaaatgaatggtgttgtcgcaatcgtagtccaagccaaagtactattaatcgtgaacatcacaataattgttcccacgaacataattccctgggaaataatttcaaaaatcgcattgttcattgcgttgaaaatattatcccaatcggaagtaagtagcgataaaagtttaccatcctgatgagtatcaaagtagcgcactaacatccgttgaaacttggcaaatagattctcacgcatgtcattagttgaatccgcattgaacttggacattaccatccaagcaataaaaatcgctatctggctcaataagtaaaacaagaacatcgaccataacgcgctatagaacgtgttcatggatgctgtacccttttttaaatcaaccaaataagtagttaaagcagtaactgaacggcctaaatatgtaggtgccataacctgtgcaccactcgaaatcagagaaaggataactacaatagtgattcccttccaataaggcttcaaatacttagcaaaatagcgcaatgcctttttcgtattactcatttattcatttcctcctttcttacctttttgtgtcttgaagatttcttggtaaaccagcgaagtcttaagcaattcttcatgcgtaccttgtgccactaatttaccgtcatctaacactaaaattgtatcggcattaatcactgaaacaatcttttccgcaataataaaagtagtagtatcaggcagctcatgctctaaagcttgctgtactttcttctcactttccgcatccagagcagaagttgaatcgtccaaaattaaaattggtgctttagcaatcaagccacgtgcaatagatagacgttgcttttgcccaccggaaaagttagcagaacgctcctctacttcatgatcgaaagaatcgttataacgctcaataaattctgatgcttgcgccatattggcagcacgctgcaattcatgtaatttagcctgagcattaccttgacgcaaattagatgctattgtacctgagaaaagaactgctcgctgcaacacaaaagaaacagttttgcgtaatgcagcttcagttacatccttaatattttgaccgccaatttttactttacccttagttggatcatataaacgagcaattaattgggccaaagttgatttaccagcacctgttgccccaacgataccaaccatttgacctggcttaatcttaaacgaaatatcctttaaagtaggatcatccccatcaggataagtaaaggaaacatgatcaaactctacgctaccgctaagaggtgcaaccgaaccactttccacaaacttgacatctggttcagtctccaatacctcacgaatacgtccaagagaaatattagctcttgaaaattgcattaaggtcattccggcaatcatgatcgtaaatagcagggttaaaacatagttcacgaatggactgactaccgcaatatcacttggatgtgccgtaatatttttaccaattaaataaacaattaaagcaattacggtataagcgatcatctgaaaagctggcataattgcagagaaccagtaaccaatcacaatgttgtagtcattcaattggtccgaagtttgatcaaactttttaatttcttgtggaccttgattaaatgacttaaccactctcacaccttgcaatgtttcttgtgcttgattagaaattcggtccatcatttcttggaatttggtaaacaaactattcatttgtcttaaaacgtaagcgccaaaaccaaaaataagtgcaaccatgaccactggtgcccaccagaagcgcggaataatcacgatacagaagataaatgaaccgacaattaaaatcggcaaccgcaacatctgcataaatagctgcatcatcatgttcattacctggttcatatcgttgatcaaccgtgtagttagagaacctgctgaaaatttcttaatattaccaaaagagaacgtttgaatcttagcataggtatcttcacgtagatcactaactactccttgtgcaattttcgctgcaaaataaacgttaaaaatacccgaaataattgcaattatacctaggactactagccagattccatcagacaagactgcttgcttctgattcgccatcaatgccttttgaatattttccaataatttaggctgatataatccagaaaacgctgaaactaagatagcaataattgcacaaacaacatcttttttataacgctttaagtatggaagaattattttaaagttttccatttttactcctttcttcacttaaaaaatgccaaaaagtagtgctccattcttctgaaagcttagctaacaatttcattttgtcagttcccatggcttgagccgttttttcctctaactcaaatagaggacgcaacctgtcataagcatatttccgccctgcttcggtaagctggcaaaatcgaactcgcttatcgctaggatcaacagtcatcgtgatatgatcatgatcacgcagaatcttaattcctttgttaatcgactgcttgggtaaatcactcagatttactaattctctttgtgtcaattttccccgaatcagtaattcatacatgattaccactaaatagtcaggcaagtcatgatcctgctcccattggctataagcacggctgccatggataattgatagatttaatttttctgtctcactaattttcattacttcaccaccatatttagtctacatgcataccaaatatattagtatgcacatggactattgtcaaatcattttgtcaaaaataagactataattaaagtaaagaaacaatttttgcatctaaatttcaaattggtataataaaaaaatcatcaagtaaaacaaggcagggattatatgcgtaaaaagtttttattaataatttcaatagtggtcctgtttgctttgccattaagtggctgtaagcaaaacaaaaagcaaaacgtttatcaagcagttaaaactagtaaaaccattaactggggcgtcaaagccgacacgccattattcggctcaataaatattaaaacaggcaaacttaatggctttgaaattgatttagctaatgcattaacccatgaaatgctaggcaaaaatgtcaaagccaatttcataacaacaacggccaacaccaagattcagcttctaaaaaacacgaatgtcgacgccgtcattgcagcaatgaccattacgcctgaacgtaaaaaacaagtcgaattcagtcacccttactttcctgctggacagtcaattatggttgctgacagtagcgccattaaaaatgctaaaaatttgaataacaagaaagtgcttgtagttaaaggaactactgccgccgatgctatccatcaagttgctcctaaagcggaaattttacaattcgatgattacggccaagcttttgccgcattaaaagctggacaaggagatgcctttgtaactgataacggaattttagctgggattttgcgtgatagttccggctataaattagttggcggcacctttaccaaccagccatatggtattgcagttaataaggggcaaaatgacatgctcaagcatatcaacactgcattagcaaaactagaaaagaatggcacatataatcacctagttaaaaaatggtttggcaacattcctggtatgaacattaaagaactagaaaagaagtaagaaaaaggctaagatcaaaattttgatcctagccttttcgcttatttagcaatgaaatcaagtaaagtaaacattacatctttatttttctcaggcacaccatgattaataatctctgtaggcgtttgatgtaaatccttattttctaaagcatatgctccatcattaatagcaatctcacgtacattatcaatttgcggttcaaagtggaactgcaacccaattacattatctcccagtaaaaagccttgattcttaactagatcactagagaataataacttagcttcggttggaatttcactcatttgttcatgccaatgaagagctgttaacttatccggaattcctgtaatagtctgatcttgcaaataaactggtgcccaacctacttccttagcgggtgcatcaagtaccttatagcccaaagttttagcaatctgctggctaccaaaacaaattcccaagatcggcttgtgttgatctaacatttgtctaatcaacacacgttcatttttgacccaatcaagatcatcattaggactgtttggactgcctaggactactaatagatctgtttcatcaacagttggcaaaataccaaaattccctggatggtaaacgaacatttcgttatctctagcatggcaccaggcttgaatagaaccaggtccctcattaggtgcatgctgtaatacattaacgcgcataaaatccctttctcactcaacaatatttttgtttttcattttatactcaattctagtggtaaacaagaagaattcagttaatcttttactatatctttagaaactatatgtcaccttatatgatataatgttatacatatttttacatctggaggacttttatggacaatcaccttaaacgcagtattggcttaggttctgcactttcaattatcgttggaaccattatcggttctggaattttctttaaacaagcttcagttttagatagcgcaggctcaacctttatggcacttttagcatggattttagctgggattatcacattaaccgccggcttaacgattgcggaaatcggtgcccagatgccttatactggtggactttacgtctatattgaaaaaatttacggccgcgttttaggttttatggctggttggatgcaggctattgtgtacggtcctgctatgatagctgcagttaccggttttttaagtattatggtgactaatctctttggcatcggcaccgaatggcgtattcccattggtttgatcactatcatcgctatcggtggtttaaactttttagaaaataaagtcggtgcagcctttgctataatcactacaattgctaagatgatccctatttttgcaattatcttctgcggcatctgctggggtgagcaaaacgctgtcgcccaaactgtgactgagctgaatcgatcaacaggtggtcttggcgtagccgttctcgctgccctttttgcctatgacggttggatctttattgctaacttaggtggcgaaattaagaatccacaaaaattattacccaaagcaatcatcattggaatcactacagtattagtaatttacgcgttaattactattggtatttttagtttcatccctgccgataaaattcatgcattaggtaaaaattcaaccacttatttggctgacgctattcttggtccaattggcggtaaagttctatctgtcggcattattatctcaatgctaggcactctcaatggagaaatgctcacctttcctcgtattatttacgctatggctaagcgcggggatttgcctttctcaagatttttatcatacgttacacctaagggaaaagcaccagtcattgccactatgctcttaattaccttaactggaattatgatgactttcttcgatcctgattacctatcaaatctctgcgtcttcacaatttatagtttctatgttttagcattctttggcttattcattttaagatacaaaaataaggaccaacgtcctttcagcgtaccgttttatcccctaattcctttagtagcaattgcgggcgggctcttcgttttagtcagccaattcttcaatgatcccgctggcgttttgctttttactggaattaccgctgtcggctggccaattttctttttagttaaaaagatgagcaaagcacagaacacgattatcgaagactaaaaatctcaaatttttcttgttcatttttaataattatgatattctaattaaaattaatttaggagattcaattatgatttatcaagacaccacattggcatactcatctagctcaagttccaactgaacttgagtgattttggtgtacgtaaatcagcagccggattcactcaatcgtttctagacgataaggtgaatccggctatttttgtataaaggagaaaaaatggacaacaagcttaaacgcagtattggtttcggctcagctttttcaattgtaatcggaactatcatcggctctggtatcttttttaagcaggcttctgttcttgacagtgcaggttcaactacaatggccttactagcttggatttttggtggtctaattaccttggctgcaggtctcaccattgccgagatagggggcgcaaatgccctacactggtggtctttatgtctacattgaaaatctctatggccgcattttaggctttatggctggttggatgcagatcatcgtgtacggtcctgcaattattgccgccgttgctggttttatgagcatcatgatgactaacttttttggtttgaatcattcatggcgcattcctttggctttaatcacagttttagcaattggaatcatgaatttcttcgaaaataaggtaggtgcaatcttttcagtcataaccacgattgccaaaatgattccgattgctgtaatcaccatttgtggaatctgttggggtcaacaagatgcgattaaccagactgtagcagaggttagccaacacactagtaacttcggtgttgctgtcttagcaactttatttggttacgacggttggattttaatcgctaatttaggcggcgaaatgaaaaatccccaaaaattattacctcgagcaatcattgcaggaattacagctgttttggctatttataccctaattacaattgggattttccgcttcatccccgctaatcaaattcaccaactaggcgaaaacactactacttatctagctaacgcggttttcggtgcaatcggaggtaaaattctttccattggcatcatcatttcaatgatgggaacattaaatggaaaaatgctgacctttcctagaatcgtttatgccatggctaaacgaggagatctacctttttctaaatacttagcctatgttactcctaaaggaaagtcacccgttgtggctactttatttattgtccttttagcccttttaatgatgattttctttgatccagaccacttatcagatctttgcgtctttacagtttattgcttctatcttttagccttctttggaatttttatcctaagcaaaaagaataaagcagagcgtcctttcagtactccactttatccttttgtgcctataattgctattttaggcggtttatttgttttaatcagtgaattaattaatgatccagctggtgttttgctttttgctggaattgtcattatcggcttaccgatcttctacgccgttaaacgcatgaataaacatcgcttgtattaaagcgacttttctacactgtagcttgcacgccacaattcttccattttagctaaacgatgccaatctcctttttgacacattgtatacaaggcatgagcaggatcataagcaattggattgccctctgcttcttttaaataagccccaacaatgctgattaacatcatccgaaagcgttcaatctcattacggctaaagtaagtttcaaaatacttagttactaagcaatcaaccgttgcatgcgaagctttgcgcaaagaagcaggattcttacgatagttatacaaagtataagttgaaattccagttgctttacttaaactagtaatcttaacattacggtcagttattagtttctctgctctttgtacatcggttaaaattttgggatgcttaaagtgagctggcattgggatacgtttacttaattctgcaattaccttttcaacagcttccttcatttgctgcgtagctacttcttcgtttaccttgtcattaagcaattttcctactacaaacgtatgatcagtcacttcataccttttagtaactgcattgtaaaaataaccttcaatacctgtaatcttaactgcatcagttccagcttttgcatagtcaaaaaagatgtgttgctgatcaccagttaatggtgaaaatggcaaattatctagcgtaaaaacttgtacatttaaagtataatctgaatgagcgggatcatctgcatcacaatgatacatcttcacttcccgatcatgaataaaatcttcaaaaataagattttttccatattttttcttcatttcttaatccccttttatatagtcctattatctattataagcaaaaaactagcttttaaaagctagtttttgtttttattagaaaatattcggtttagggcaaataattaccagcagctaagtataaatcgtaccactcttgtctagtcaatcgaatcttggcacctttagcagaatccctaatgtgttgcggattcattgatccaactagcatttgaatatttgcaggatgacgtaaaatccaagctgcagcgatcgcatttttacctacctcatacttatcggccagtttttgcaactcttgattcaacttggggaagccatcattatcaatgaaagtcccttcaaacatgccatactggaatggtgaccaagcctgcacagtaactttgtgtagacgggcataatcaagaaattggctatcacgatcaactgatggtttatctaccatattcatatgcatcccaaagtcaatcattcctgtatgtttcaggctaaattgtaattgattgaacatcaagcgctggctcaagcaactttgtaacaatttaaattgagccgtatcaaaattagatacgccgaaaaagcgcaccttacctgctgcctgtagttgatcaaaagcctcagctacttcttctggatccatcaatgcatctggtcggtgaagtactaatgaatcaagataatctagttgcattctttccaaaatttcatcaacactatgcaaaatatgttctttagaaaaatcataacgttttcctggaacaattcctgttttagattgaataaacatctcttcacgcttgatctgcatttggctaaaagcttgaccaaaaatctcttctgattttccaccgccataaatatcagcagaatcaatgaagttgatcccagcatcataggcggcttgaattgccacttgagcctctggaactgatttttgattcattcgcataatgccaagtgccatcgctggaatgcttaaagtagtacatcccattttaattcgtttcataatgtaagtcctttcattctttatttacctcacatcatgaaccaaaaatagctaagtttcaaccacaagaaattcaataatcttttattaatatatcttagctactgccgattgaattgattctttatctaagaattcgtcataacttgtatcttggcgactaacaatacctttaggtccaacttcgataatgtggttagcaatagtttgaataaattcatgatcatgtgacgtgaataaaattgaacctggatatgaaacaagggcatcatttaatgcagtgattgactcaagatctaaatgattagtaggatcatccatgatcaatacattagccggttcaagcatcatacgtgacaattgacaacgaaccttttccccaccagaaagtactttgatcttcttctcaatttcttctccactaaagagcattcgacccaagaacccacgcaagaaagtattatcatcttgttccttagtcgcatattgccgtagccaatctaagattgtaagttcatcattattaaagttagcgttcaaatcgcgtgacatgtagttaaaggccgttgtttgaccccatgtaacggtaccagtatctggcttaagtttaccagcaacgatatcaagcagcgcagtcgttgctaaagcgttacgcgataaaaatgctaccttatcaccaggacgcacgatgaaagacacattatccagaatcttttcaccgtcaaccgaataagaaacgttctccaccttaactagatcattccctaagtcacggtgcatttcaaactttacaaatggatatttacgactcgatggtttaatatcgtccaaggtaattttatcaagttgtttctttcgagaagttgcctgacgtgatttagatgcattggcagaaaagcgggcaataaattcttgtaattgcttcatcttttcttcttttttagcattttggttagcagctaattcattagctagcttgcttgattcataccaaaagtcatagttacccacataaagctgaatcttaccacgatcaacgtcacacatttcagtacatacttgatttaaaaagtgtcggtcgtgggaaacaacaatcacaatgttagggtaatcagccaaaaagtcttctaaccattcaacggtatgaacatccaaaccgttagtcggttcgtccaatagcaaaatatcaggattaccaaacaaagcttgggccaataagaccttaactttttcgctttcaggtaaatccttcatcatcatttgatgttcttcttcaggaatccctaatgattgcagcagcttagccgcatccgcttccgcattccaaccatcaagttctgcgaacttgctctctaattcagctgccttaaccccatcttcatcaccaaagtcaggtttggcataaagagcatctttttctttcattacttgatacagttccttgtgcccttgaattactgtgtccatgacagtgaagtcttcgaaagcaaagtggtcctggttcaagctggacatgcgctcattgggatcaattgaaattgaacctgttgttggttccagtttcccctctaacaatttaagaaaagttgacttaccggcaccattggcaccaattacgccgtagcagttgcctggagtaaattttaagttaacgtcttcatagagtgtgcggccaccaaatcgtaaactaacgtcggatactgtaatcaatctctttacctcgcttaaaatataaaattatgtttaagtatatcaaaaaagatggtcccttataatagagaatccatctttttaagcaatttattaaaactttttgaagctatctagcttttcctgggtaatatcacgaataattgcagtagctaaatcaactgaagccttaaagtccttataactactgaaacaatatggtgaatgttcatagcgcaccggaataccgatgacaattgttggcgcaccattttcgtagtaaattgcagcaccatcctgaccgccaccggttctaaccgaacgagtatatggaatattatttttatcagctaaatcacatgcatattgttggaacttaggatttggtaaaaatgtcgtatccatatcgcgcaacattgggccacgttttagaccagtttgagaaagccagtcaggcgtaaaagtatcatcagctggacagctttcgagtaccagacaaagatctggcttaacttttctagccgttacataggcgccacgcaagccaacttcttcttgactagaaagtgcagccactacgtcaaagttagtttcttcacccttcaaattatcaagcacatcaaccatcgcaccagcaccaaaacgatcatcaaagtctttaccgaagaataaaccggacttttcatgatattcgcatttaacatcaacaaagatagggcaacctgtatcaatcttgtagtccttgattgtctcctcacggctagaagaaccaacatcaattgacatatctgccacatcaggtacactattgcgctcagctgctgtcatgaagtgaggcggcttagttgctacaacgccagggatatattctccatcacgattgcgcactttaacgcgcaaggctggaatattatattttacccaaccaccaagtggaacaaacttaattaaaccattagggcgaacagcttgcgtaatgaagcctacagcatctgagtgcgcatcaagttgaattaccggtcgatttcccttattttctttcttggcggccccggatttaaaattgaagtgcaacactaagtgttaaacaaaaaggccatgaagacctaaacttgaagtgacgaaaaatcaagaaaggaagatcttcatgaccaattcaaattctagcatttctaagcactatcatcaattaaccagcgtacaacgtggacaaattcaagcaatgctggattccggcataacttcccgtactgttatcgctcaagaagttggctgccataagtcgacaatcagtcgcgaaatcaaacgcggaagcgtcctgcaaagagacagcagctatttattgtatgagcactattacgctgatactgcacagatttattatgagaagcgtcgcaaaaactgctatcagcgcaatccattgaagcattatgctgtctttttgagaatgctctccagacgctttaaagctaaatttgatgccaccagcatcgatgagttcgttggtgaattcaaaaggactatgccaggctacccttgtcccagcacaccaaccgtctatcgctatattgatcagggcttgctggacataagcaatattgatctgcctatgaagctcaaaagacgcaggaacaagcgtcatcacagccatggcggtcacgctttgcacaagaagcatcttggcaattccattgaacagcgtcctaaagagattgaagacagaaaagctccgctgcactgggaaggagatctggttaaaggcgtcagacgcaagaatcagcctgctttaatgactttgactgaaagaaccacacgctttgaagtagttatcaagattcctgactatcgggcaagcacatgccaaaggctgcttcaaaaggagattgacagacatcctgcctggtttaaatcaatcacgtttgacaatggctctgagtttgcggatatgaccaagatcaagggctgccagatttactttgctcacccatattctccatgggaaaggggcaccaatgagaactgcaatggtcttttgcgtcaattcttccctaagagcaagagcatgaaagacaagtcaaaagcttatgttcaacaggcaactgatgccattaaccacaaatatcgccgaatcctccaatatcacacagcagaggaactcttcaagcaatatatctcttcataacctaactgttgcacttaatttgacaattcaggaattatttattttaagaatgttacaaggtatttttgcaggctttgtttctaattccaatgctctagttgcgactgaaactccgaaggaaaaatctggacaagcacttggcactatggcgtctagctttactgctggcaacttactcgggccatttattggtggagccttagcgtctattttctcctatcgcgttaccttctttattacaggtggtctattattaattgcatttcttttgtcattgttctttgtccatgaaacagacttcaagccagtaactgaaaagaaacttgataaagcaagcggagtaattaaagaattacgctcaccgcaattaatctttggcttgcttttaactactctaattattcaagctgcaaataattcgattaacccgatcgtttcactctatgttaaacaattgatggctaaccacggtaatgtcgtctttatttccggggtaatagctgctttgccaggaattgctacattccttgcggcatcgcgcttcggtgcactcggtgaccgaattggaactcataaaattattattgctggctttattggagccacaatcctcttctttttgactgcttttgtacaaaatactgttgaacttggtattttacgctttttagtcggctttactgatgcttgcttgttccctcaagtgcagactttgcttactaaaaatacgccagcaaaaatcacgggccgaattttctcttggaaccagtctgctatgtacatcggtaatattttcgggcctctgctgggttcaactatctcaggattaactaattacagcactgtctttatcgttactgctgggattgttgtcttcaatttgattttgtttagatttaatgtgattaaaaatttgcagtaaaaagtgtctgggaaaaaactaagtctcagatcatgaaaaaagaacgttgaatttttgtttcaacgctctttttgtatacttttagctccagccttgatattattaaatcatcacaaaataaaaaaggtggaaactaacatgtacaagaattatatcacaggtcaaactgctttaacacttaatctagattttgccattccggccaatcatttggctaatgtcatcagctggtttgtagattcaattccagaagatgttttagtaggcaagactgctaaaacgggccgcccagcctatcatccagccatgatgctcaaaatactgctttttgcttactccagaagagttttttctggcagaaagattgagttgatgctggaagaaaatctgccaatgatgatcttggctgaccagcaaaagatttcatatcatactatcaataattttagatcaagcagccatgccaatgaactgattaaaaagagctttatctacttcactaacctgttagaagatgaaggcttaatcaatgaaggtgctgcttttatcgatggtactaagattgaagctgatgctaaccgctatacatttgtctggcgcaaagcggttgaaaagtatcatgaaaagctgaaaggccaggcagttgaactttatgatgaattgattactaaagaagtagtcaaagaaatggaaaaagaaaaagttcaaactagtcaggggctaaaggaattagctcaagaaactgaagcagaaattaacaagctgactaaagagattgagcaggaaaacaaagccattcctggcggttcacctcgaaaagccaagcgacgtggactaaaaaagattctgcaccggctaagaaaagattatgtgccaagaatgcaaaaatatgaagaagccgaagagatctttgccggacgcaacagttattccaaaacagatcatgacgccacctttatgcatatgaaggaagaccacatgaaaaatggtcaattaaagcctggctacaatattcaagcagtcacgaccgatcaatatgtagttgattatgccatctttcctaatccgacagatttcaaaactttggagccggttttggatcaaatgaccgtgttggacaagtttgacaaaatcgtcgccgatgctggctatggcagtgaatacaattattcgatgctggaggaaaaatatccagacaagaagtactttattccctacactatgtatgaaaaagaacagaccaaaaagtataagaatgatccaactaagctaatcaactggtactacaatgaaaaagatgattattacattgatcatcatggcgtcagattcaatttcaaatattacagccagcgcaaggatcgttctactggtcaggtccgtgattttaaggtttatgaggcagacgagttccagctaacgccagaattggaacaattggctaaaacagctagcggccgccagcgccaagttcgctataatcctaactggcaatatttaaaagaaaaagcaaaagaagttctccaaagcgaagaaggcagacacatctatggcatgagaaaatatgatgtagagccagttttcggacatttgaagaacgtatttggcatgcgcagaacgcacctgcgaggtaaagagaaggtcgaaaccgatatcggaattgcctttatgatgatgaatttgaacaaatattgtcaaagaaggtggctgaagggccgatttttattgttaaaaattttaaagagaacaaaaaaacgatcaagattcttaaaaaaggaaatcttgatcgtttttattcatctggaagctagttttttcccagacacttttctattccgcagctttctttgcttcatgatgattataaataaagtttgcaacatacccacaaataattagcaacaacgatacaatcataatttctctaattccggtatgaaaaattgtccgcattgttggcattaacgccttaggcaaactcttcgcagattctgcgtcactcaacttattcatcatggtcatcgtaatattgtggtgtccagcaattccacgtgctagagctaaattcataatcaccccataaacggcagccataatagtttgcgctaaaattctaatcaaaaaactaagcgatgtagcaggtgccatatccttttcaccagcgtcaatctgcacttttatttgaagaataacgaagattgagcctacacctaaaccagataacgctgcaatcgacatcaaaatctgatatggcgtactaattggtacaataattaaaccgattactgttattgcaatcaatgtaaaatcgaaaattaacaaatgataattattaaaatgtctgagtaaatgcggcgtactttgtgaaccagcaatatcaaagattgagttaggaatcaacgtcatcccaccgattaaggccgttgtccctaagattgcctgcgaccacatcggcaaataagtgttaactgcaatatatgcaccccaggcaaaggcaaaaagaatgaagtcaccaactaaagctttattagtaaaaaccgataatggcacgataggactagcagcttttttctcaactaagatgaaccagacaagcattacgatcccgataatcacgaaaatagccactagaaaattactagctagtcctaacatctgaattccaatcaaaaagcaagtcaaaccgccaattagggtaaaagcacctagtcggtcaaagacagtattgatgtttggcttacgaatgccacgataaaaaagaaaactcaagataattgataccaatcctaatggaacattgatataaaagacccagtgccaggacaaagcatcaacaatccagccaccaactagtggaccagcaatacaagcggccgaaaaactagctgcaatataactcaagatgacagttctacgtttaatattcggataaatataaccaacaatcacataaggaagagaacccattccaccagcaccgacacccatcagtactcgagaaacaaggaaaaagtaaatatcgggagccactccttctaaaactgaacctaaaataaataaggctagtgacagttcgaaggcaaatttgttacccattctttcaccaattttactccaaattggcactgagaccgacattcccagtaaaaaacaggcaacaatccaccccatatactgaattccgtgtagatcggacacaattgctggaatcgccgtattaataattgtcgcatctagccctgacataatattagccagcaacaaagacaaagtaaccattgatatttgcttcttagtcatttaatcccacctttttaactctaaaaactactattactcatagtatgcaagatttaactagcaaaataaagcacaatatttttccactaaatcttgacaatctgtgtttttccgagttaaatataaagaaaataatagtgatgacctttaaagttagtcccgtgaggctaagaaggaaatctgcacaagctaatactttttgtcgttagctaatacagaaggaccatcttgagccatgcgctcttggtggtctttttcttttggtcatccagaaaggaaaagctatggcaaaagaaataatcgatgctttaagcatgaaacgcgccttgatgcgaatgacctacgaaattgtcgaacgcaataaaggtactaaagatcttgtattagtcggaattaaaactcgcggttggtacttggctgagcgaatcgccaaaaatttgaaaaacttggaagatgttgaagtccctgtaggggcaattgatatttcacaatatcgcgatgatttaccagaggctgagaaggaaaagatgatccacagccaacaacttgacttcgatatcaccgataaaaacgttatcttagttgacgacgttcttttcacaggtcggacaattagagctgcccttgatgcgttaatggatcaaggccggcctgcaaaaattaatttggctgttctagtagatcgtggtcaccgcgaattaccagttcgtcctgattttatcggtaaaaatattcctaccgcaatgaatgaaaaagtccaagtctcaatgaccgaagtcgatgagaaagacagtattgaaatcgttaaataggagttttaaatgaataaaaaagaaaagtacagaaaccctgaggctatcttagacgtttatgaaaagcctgaatttggccaaggcgtactgctatccttacagcatatgtttgctatgtttggttctaccgttttagtgccaattttaattggaattaacccaagcatcgctctactttcatcaggaatcggtaccttggtccacatgctcttgacccacttcaaaatcccagcatacctcggatcaagttttgccttcgttgctacaatgcaagccttaatgaaggctgatggctacccggcagttgcccagggtgcgatcgcttctggtttagtttacgtagttgttgcgatcatcattagcaaaattggttcaggctgggttaacaaagttttaccaccaatcgtagttggaccaatcatcatcgttattggtttgtcattagcaactactgccgctaatgacgctatgatgaataattctaagtatgatttgacttacttcggtgtagctatcttcactttggtcatgaccttagttttccaaatgtgcttcaaaggcttcaccagtttggtttcaattatgctaggaattatctgtggctatatcttatcctgctgcctcggaattgttgatttctctggcgtggaaaaagcagcttggttcacattgccagcacttgatgtgcctggaatcagttaccacttcaaatggtatcctgccgctattttagccatggcaccaattgctttcgttacaatgacggagcacatgggccacattatggtattgaattcattaactaagcgtgacttcttcaagaatcctggcttacacagaacgatgatgggtgacggtctttcaacgattatcgccggtttcattggtggtcctcctaccacttcatacggtgaaaacatcggtgtgttagctatgactaaagtttactcagtttgggtattagctggtgccgctgtttcggccattatcttcagttttgtcggtaagcttgccgcattgatcgaatcaattccaatgccagttatcggtgggatctccttcttactctttggtacgatcgcatctaacggtttgaagatcttagttgatgatcaaattgactttggtgaaaagcgtaatatgttaattgcttcagtcattttggttatcggtatcggtggtgcttacctacaactgggcaatttccaacttacctcagttgccctttccaccattatcggaatgcttttaaactggattttgcctaagaaagcagctagtgaaaaggctcaagaagaaaagattaagaaagaaaaacaagaaggtaaaatttaccaatagatagaataagccatttaaaacccgttagttatcgcaatgatagctaacgggtttattttttactctcactttgcgcacacaatgttgtaagttgtgcgaaagttggcaaaagttagtgtaagttaattgtaaaagcttaagaagctaacaaagccctatatatcaaggcttcgagctactttagtaaaaactttgctctcactttgcgcacgcaatgttgtaagttacgcgaaagttagtgtaagttgcgagagcaatagtatataatttattgacacaaataaatttaagtcatgaggtgacattaaatggactttttaaacttcaaagcaattacacaaactggtaattttaaaacaccatctgaaaatgaaaacatcgaatacaaagaagctagttggaaattacctaaatcattttgggaaactgttagctcttttgctaatacttcaggtggaataatgagactgtaaaatagtttgtgtaaggatgaatgattccttaaatttatttctttaaacattagaaaaaggagttcctttctcgtatgattggtttgaacaaaaaaacacatacagaaagaagaactccttcatgaatgattttaccaaagattttgctcaagctctattcaatccagacaaaataaatgatttattgcgcaaagagctacaacaggctgttaataacttgttagaagctgaattgactgcctttctgggctatgatccctatgccagaaatggctggaatactggcaactctagaaatggtgcttatttccgcaaagttcatacgcaatttggcccaattgaagtgcaagtgcctcgggatcgcaacggtcaatttcatcagcacacgctgcctgactacaagcagcactcggatatcttggaaagcatgattatcaagctttactccaagggcgtgaccaccagggaaatagccgatctaattgaaaagatgtatggcagccattacagtccagctcaggtatcaaatatttccaagcagatgattccaaaggttgaggcttaccacaaacgcaagctaagcgacaagtttttctgcgtctatttggatgcgacataccttcctttgcgccgagaaacatttgagcgcgaagcagtctatattgccattggcatcaagcctaatgggcacaaggaggtcattgactactgcattgcgcctagcgagaacattgaagtctggacagatatgcttcaaaacatgaaatcccgaggcttaaagcaagttgagctttttctttctgatggtgttgttggcatgaaaacagccttggccaggacttatcctaaagctcattttcaacgctgtttggttcatgtcatgcgcaatatctgcgctaaagtacgcgtcgacgatcgtgaaaagatcatgaacgaattcaaacaggtgcatcaacagacaaacaaagaagaagccacagctgtcctgcatgacttctataccaaatggggcaaggtttacagccatgttatcagaagcttgaaagacatagaaccagatctgctggtcttttataactatcccaagcagatcagagcttcaatttattcgactaacatgattgaatcatttaacaatgtgatcaagcgcaaagctaagcctaaggcagagtttccaactgaacagtcgcttgatgcttttattggtattcaggcaatgagctacaatgaccgttatttcaatcgaattcataaaggctttggtcaggttcaggacaccttagaatcctactttgattaaataaataattaaaaaatcaatttacgagaaagaactatttacacaaaagatttgacagtttcggaataatagtattaggcatagcagaagataagaataaacatgaatttagtataactggtgtagacaatgttgaagacattgaaacacaaattttcaatgataataacaatatttcatgccttaatcgacctgtaatccaaaataatgatgttcagatttctttttttcaaaataaaactattattcaagtaataattcatccagaaccctttaatactcgtccaataactgcattcggtaaagcatatattagaactggtgacagagatcgagtagctactaaagagcaacttaaatattttacagttgaaagtcaaagcgagattgatactcacttactaccttcgacctatacaatagaagatctagatgcagaaagtatcaaagaatatcgcaaaataattgaagaaaaaggtattattaatactaattctcaacttagtgatcaagaattcttatattcaattggtgttttcagaaaagatcgattaagtaattcaaatgaatatcatcttacagatggtggtctccttttctttggaaaatatatttcgataacagatcgtttcccacgttttcaattagactatcaacaatataatagcgataattctaccaactggaatgatagagtttctgcaggtgacatgaattatcccactttaaatatcttttctttttataatttagttttagctaaaatagaaacaaatatacgcatggtgctagttaaatcgttttagttaataaaaaagtccaatcttgttagactcgacttgtaaatagtaataatagaaaagagtctgatctgattgaactgtcttaagcttaagcgttttagccaccatttacaagttagttttaaagatttagtgataatttgtcggcactggtatcgtttgtatgcaccggctgagtttactcatcggcgaaatattgatcaaattaaaactacggacagtctgattttggctttacttatctggcaagctaagacaggaattgaatcacaaagaagattctgtgaatgtttcaattgtttatcacactcacgttttaatcggcgttcacgtcagctattgcaattgatttatcagatacggcaagaaatgaataaaaaggttgacctgaatggacatttcttgatcattgacagctttccggtacctgtttgccaaccaattcgcaactatcgtgctaaaatttttcgcggttatgccaacattggttataaggccaccaagaaaatttacttctatggtttcaaagttcatgccattgttagcgatgacggttacattcttgattatgtcgtaacaaaagcatcagttcatgatgccaaggagacagttgaactgctggaaaatgcccatccatctaattactatcttcttggcgacgaaggctatttaggcaaagaactgcatcaacagctaaaacaaatgggttatgaactttggacaccatatcgtaaaaatatgacaggagctaaaaagcacaatgatcatcaattgatggctattcgcagaacaattgaaagcgacttttcgcttctgacctattacaatgccgagaacaatcgagcacgtagtctgataggctttcaaagccggttggaaattgcaattttagcttataatttggcttattgtctagaaagatttaactagcaccacgcgtacaaatatacctgatccatttattcaaggtaatgaccttagtagaacgtcctatcacaacgatctaatcatcgcagctaaggaagccctagtcaattgtttaatgcattcatattatgatggtatggtaggtgtaaaaattgtagatagacctagttactttgaatttacaaaccctggtactatgcgcgtaagtaaagaatcgtttttacgtggacaatattcctccattagaaatactgaaatcgctagtttattcagacgaattggtgtctctgaaactgcagctagcggtggtccaagaattcttaatactgtgttgcaaaataatttaaatgatcctgaaattaacattgattatgaaatcaatactactcgcattcgtatttttaagacttttgcaattgataatcaggaaaaattaactgaaccagagaaatttattatgtcttttgctagcagaaatcctaatttttcaataaatgatattgttaaagatccgcagaatcattttggtaaacaaaccacgattagaaaatatgtaacttaaacttcccacacgcaaaattgcttgtttcattgtgattctgcgtgttttgacaaatataaaaggcacaagtccttttcattgctataattatattgaccaaaacataatttatttgcatgaaaggcttgtgccaatgtctattttaccatctcctgaccaacaaaatgaacaactattttcaaactcaatcatcagcttcatcaagaagtttcaggtgatcaagctgttgagaaaatgtggcttccgcaaggaaaaaggcattagcctgttcagcttgtttctttacgttttaagcaatgtctttcgtgaccgcagcttatatatgcagctgaaaatggatcattttcaagaaaatttttccaagaactcatattaccgttttatgcgcaacgttcacgtcaattggctccacttcaccacacttctgtctgcgcaaatcattaataaccacttgcgatctttgacttcagaaaaacgggctgattgctttgttgtcgatgattcctacttctctaggaccggcttcaagaaaacagaattagtcgccaaagtttttgaccatgtatcaatgacttacaagaaaggttttcgcatgatgaccctgggctggactgatggagcttctttcatgccaatcaattcagtgctgctgtcttctcagaagctacagaatatgattggcgaaaataaagtttttgatcagcgcaccattgctggccaaagacgtatgcttgcccggactaaaggcacagacgtgatggttaatttaatcgaccaagctatgaaagcaggtcatcaagccaagtacgtgctgtttgacagctggttctcaaatccacatcaaatcgtccagctcaagcaaaggaagctggatgtgattgccatggttaaggttagctccaaaatcaaatatgaatttgagggagaacgcaaaaacatcaaacagatttatcgcagctgtaaaaagcgatgcggccgttctcgctacctgctgtcaatcccagtcaaagtcggacgccaggacaaagacggtgctaaaatagatgcacggattgtctgcgttagaaaccgtgccaatcgcaaggattggctggcaatcatttgtaccgacatgtcgcttagcgaagatgaaattatccgcaactacggcaagcgttgggatattgaggtttttttcaaaacttgcaaaagttatctaaaactaagtacggaatatcatggcctgtcttacgatgctttgaccgctcatgttgccatagtttttactcgctacatgcttatgtcagttgccaagcgggacgatgaagatgaacgcacgctaggcgagctgttctattgcatgattgatgagctggcggacattacttttagccattccttgcaattgattactgatgcaatgctggccagcgtaaagcaagtctttcatgccagtgaagcacaaatagctgaattcacggctgactttatcaatcgtttacccaaatacatgcaaaaattgttaaagaaaactagcaaaaataatatagaagcctaaagccaagcaagatcaagagattactggcttatttagtgtgggaagtttaagtatgtaaattcattagtagagaagcatttactatccaatgagaaaattggcaaaaaatatatctacaatttacagaaaaacaatgattatctaaatcgcgttaagcaccttaaacatcttgaagataatttactcaaatagatcattcaaaaagctcaacctacaaaattcatgcagattgagctttttcatcttatttatcttcaaatattctaggcttatcgtcatcaagtgaaacatgcggaatttcggtgttatttgtctcaacttgatccttctcagacaattctgccttcattaactcacttttggctttactagaagtattgcctaaaagtaaagttttctcctgcggcgtattcaccattgcctgtttttctttgaattttttataaacaatcgccgctactgcaccaatagctccagcaacaccgataattgtgccgattaatctcatctttttcatagggatcacctcgtattttgaaatcactttcttattcttaattatatctaattatgaggttgaacacatttttaatgcctattacctaaaactttccgcaatttccggatccatctcatcttctaaaacactgtagccttgatccaaagtcttgatcaatgccatatcctcatcatctagttcaaagtcaaacacatcaaagttttctgctaatctagccttatgaactgacttaggaattactacataatttctttgcaaaaaccatctcagcatcacttgagcagtagtcttatgatgcttttctgcaatcttttgcaagacaggattagtgaaaatgtggttggctccttctgcaaatggtgcccaggcttcaggttgcacgccctctttttccatatattgctgtgatttccattcttgattccagacattagtctcaatctggttcacagccggctttacatcattaaaagtaatcaaatcagctaagcgttcattccaaaaactacttacaccaattgcccgaatgcgtccctctttatataaacgttctaatgctcgccaagtgccatagtaatcgttatatggcttatgaatcagatacaagtcgatataatctaactgcaactttttcattgaatcatcaaaagcttgcaaggtatgatcatagccatacttatcgacccagatcttggaagtgacgaaaatatcctcccgtggaatgctgctatgcacaagtgcatccccaactgcctgttcattgccataaatttgcgcagtatccacaagtcgataacctacttccaagccgttttctacaacttgttgagtttgagctaaatcatcaatttgataaacgccaaagcccaagcgtggcattttgacaccattatttaaaattacatagtctttcatatttcttctcgttttctagttaattattgctatttaattttattttaacatagcccatgaaattcgactttatttcgtgaaacatagatattatttcttaaaattaagcactcaagaaaagcctaaccagcatccctcaacggaattgccagttaggcttcttttatttttcaacttttgcttgataaaatccaaagctcatctgcttcaacattctagtaaaactatcaatgtctagctttttaccggtagtcaaagcttcaaattcaccatcaggatcaaccaatttgcggtcagtcctgtgaaatccatttctttcatagaatttcaggcgactaacacgctgcttataatttttcgccttcttggtaactggctcaatatcaatgacaatttgcttatcagggaatcgatcctctaacatcatcaagatcttggaaccataaccttgtcctcgcaatttttcattaatggctaaataggtcaaatagactgtattatcattctcagcataataagtaatgccgcaaaactgaccatcattataaattgcgtgaaacttaacatttcggtgtaatgacattgctaaaagagaaaacatggagaatctttcccaagctggaaaagccttcatatataacttcttagcgtcacgatatgcttttgtgccccatcgggcgggtttagagtctaaaatagtatccttcttttctaattaaaaattgattgttaataactctgaataatattattatacaaaactttttagctttttggaaactgtcaaatcttttgtgtaaatagttctttctcgcaaattgattttttaattatttattcaaaataagattctaaggtatcctgaacctgaccaaagcctttatgaattcggttgaaatagcggtcattgtagctcattgcctggatgccaataaatgcatcaagcgactgttcagttggaaattctgccttaggcttagctttacgcttgatgacgttgttaaaggattcaatcatattggttgaataaattgaagctctgatttgtttgggataattgtagaagaccagcagatcgggctcaatttccttcaaacctttgatgacattgctataagctttattccatctggcatagaatttgtgcaagacagctgcagcttctttttggcttgtctgttgatgtatctgcttgaattcgttcatgatcttttcgcggtcatccacccggactttagcacagatattgcgcatgacatgaaccaggcagcgttgaaaatgagctttaggataagtcctggccaaggctgttttcatgccaacaacaccatcagaaagaaagagttcaacttgcttcaagcctctggacttcatgttttgaagcatctctgtccagacttcaatgttctcactaggagcaatgcagtagtcaatgacttccttatgtccattaggtttaatgccaatggcaatatatactgcttcacgctcaaacgtttctcggcgcaaaggaaggtatgtcgcatccaaatagacacagaaaaacttgtcgcttagcttgcgcttgtgataagcctcaaccttggggagcatctgcttggaaatatttgatacttgagctggactataatgactgccatacattttctcaatcaagtcagcgatttctctggtagttacgcctttggagtagagcttgataatcgtgctttccaaaacatcagagtgctgcttgtagtcaggcagcgtgtgctgatgaaactgaccgttgcggtctcgaggcacttgcacttcaattggtccaaactgggtatcaaccttgcggaaataagcaccatttctagaattgccagtattccagccatttctggcatagggatcatagcctagaaaggcagtcaactcagcttctagcaagttattaacagcctgttgtagctctttgcgcaataaatcatttattttgtctggattgaatagagcttgagcaaaatctttggtaaaatcattcatgaaggagttcttctttctgtatgtgtttttttgttcaaaccaatcatacaagaaaggaactcctttttctaatgtttaaagaaataaatttaaggaatcattcatccttacacaaactattttacagtctcgctttttgacataatacttatcttccattcaaaatttaagtatgcattaatattatttattttagtaaccagtcaatgacattaacttggctaattccattatcatcataacttcccggatcttcggtaagtaatatcttagggtagttatccttaatctctaaaaaaggtgctatttctctttgataagttttttcattctgaaccgttaaactaacttgatagtattcccgaataccatcgcgaatagcaacaaagtctacttccttttttcctaaatttcccacatacacttcatagccacgtctgattaattcaagatagattatgccctctaatctgttccccatattaggacgcttttgccccaacaacgctcttcttaatgaaggatctaccatataatacttattgttaatttgtaaatactttttaccagcaatatcataacgatcacagcgataaaataaatatgaatctaccaatttttctatatacgccatcactgttgcgcttgtcgctttaacgccattattcgatagcacattcgctaccttagttggagtaattaaattgccattagtatcggtcaaaaaagctgcaatatgttccaacaaggtagtatttcctcgttgcattctagctaagatatccttaaccaagacagtgttaataattccttgaatataagacagataggtattttcatcctctaattcagtagcaaaagggaatcctcctcgctctaaataacgattaaaagcttcttgatgggataactcaggaactgaggctaaaaattctttaaaagaaaagggatatacagggatttcaatatacctaccagccaataaggttgctaattcacctgaaagcataaaagcattcgatccagtgacataaagatcaacattttgcttgataaaaaggctatcaatagctttttcgaaatgagggatgtcttgaatttcatctaagaaaatataattcattttatctggaatcaatcgttgatcaatatattgatacaattttaaataatcagtaattgtagcaagccctaaatcttcaaaatttaaaacttgaatttgttcctgcttaacacctgctttaagtaattgttcctgatatagttttaaaatcgtggacttaccagaccgacgtactcctgttaaaactttaattatttgtttatcacgtagtttattcaatttatcaatgtatttaggccgcggaagcatttttaatcctttcaagttaatgtaattcaaattagtttaattttcacgtcaattttagcatataattcaaattagtttcaatctcttaaaacttctgagatgagttttaatttaatttgaatttactcaaaggcttaccactaaatttaaataaaaagaaagtctgtcaatctaacaaactttcttttttcataaataatcgttaactacatcaacttatatttcttcatcaattcttcgatataagtgcccttaaccttcttaagcatccctttaatcgcaaacttttcaggcattggcaaatcaagatcagccaacttcttctggtcattcaggtaatacatcgcattcatcaacattctgacatcaaatgcggaagcgaagacttctggtacaccgcggtcaatattaagcaaagtgtagacagcttccattgccgtccgaactgaatactctgtcgtaaagacagtgtctcttggagtttcggcaaagttaccaataaaggctaagttcttagaatgatctggaacaacctttgggcggtcgcctaaagctcttggcataaagtaagaagtaatatatggcatgtgaaccggaattgttgtagctgcggcagctatttcaggaattctttcttccggcacacccatgtgatagagccactcttcacacatttcaagcccattacaatcaggcatcgtcttttccacataattacccttggtatcagagaataaaccatataaccaaacaattaattcatttggtttttgcgccttaaagtgtggctgacggctgattgagtaacctaatagccaattagaatccttaatagtagttggtccactagttacgattgagccactgtgtggatcctttttattaacagcttcaataaatggcacaacatcatcattcttaaaggtaatagttgaagacatccgccagttagcctttggaatatccttgcaaaagacatcaggatggccaaagtcttcatcttgagctgctaagttcttccacaatcgccagcttgcacccaattcatgttctgctggagcgtgatgcagttgatctccataggtagtactctcagtaattgaaccattagtaacgaagactaagtcatttggtgttaagtcaatggtcttcttttcgccatcttcggttaaaataatttgtttagcaaccttttcgccgtcagagcggttaacaaagatattatcaaccaccgtattatagtggaagattacaccacgatcctttaaatacttgaccagcggcaaaatcaatgattcatattggttatacttggtaaaacgcaatgatgaaagattcttcaaggttgctacatgctgtacaaagcgcatcaagtagcggcgcatctccatcgcacttgcccatggttcaaaagcaaacattgttgaccaatataaccagaagttagattcaaagaattccttagtgaagacttcattaatcttcttattttgcaagtctttttcgggagttaaacaaagatcaacaatttccttcactgcctttggtgtcaaaagaagttgcccatcagtcggcaaagcttgaccacgatttacaattactctagttttagcataacttggatcttttctatttaaacgatagaaggaatccaaaatagattcaccttcatggtcaggcgaagggattgatctaaataaatcccacaaacattcaaagtgcggctccatttcacgaccgccacgaatgatgtaactttccttttctttattatagatcccatccattgagccaccaggcagacctaattcttcaaaaatgtgaattttcttgcccttcatttggccatcacgaattaaaaagacagcagtagctaatgcagccaagccactaccaacaatataagcagatttttgatcaacatctttaggtttatcagccttaacaaaggcttcataattgccattactataatgcataattgacacttctttcaataatcgttacacttgtaactatttatgcttataaaataatgtaagcggtatcagttgtcaaacattttacatttggggatgatcttgatgaatatgaagagtctgcatacgcagcaacaaattgaacatgcattattcaaattactacaaaaaaagccttatacggagatctctattgcagaaatcacccgtaaggctaaggtatctcgtacttccttttatcgcaattatgaccaaaaagatgaagtcattgcgcaatttttatttaatcaataccataattttatcgctgatattgatcaacataatttgagaacttttaagcagcagcttactgcctaccttgaattcttcaaagataatcctcaactaatgaaattactgcttgatgcaggatttgaaggagaattacttaattttcaaactaaatatttgaaaaagctgatgtcagtttaccattctgatgtccacctacccgactatgcaatagcctatcaatctggtggaatctatatgctgttagtctggtgggttaagcaaaattatcagaccagcttgactgatttaatcacttatgccgaaaaacacattatgctgtaactaaaaaagaagagctcacaaatcgagcttttattttcaaaattattacaatttcttgcattttttaccaaagttaaagtagaaattcattacaaaggcgataattaacaaaatcaatgaaaccaacataatttccttaataccgccgtggaaaatagttctcattgttggcactaagttttgcggcaaactcttggcactttgcgcatcactcaatttattcatcatggtcatcgtgattcccttgtgcgtttgaactccgctggcccagttcagattcataattacgccataaacagcagccattactgtttgagctaaaattctgatcaaatatgaagttgaagtggccgttgccatattctttagtcccgcatcaagttgtacctttaattgcaaagcaacaaagataaagccaaccccaatgccagaaaatgcaccaataaaggtcaacatctgcacaggcgtatgtatgccagaaataaacaaaccagctgatgagataatcatggcaactattccaatcaaaactaatttaaaggttgtcatatgctcctgaatcgctgctacactttgagatgcgataatttcaacaatcgaatttggaattaacgtcatcccaccaattaaagctgacaagcctagtaatgcctgagcccacattggcatataggtgtttactgctaaaaaggcaccccaagtaaaggcaaataataaaaagtcgccatctaaatctttatttttaaataaagaaattggaataattggattgtctgcatgaccttcgcgaataaagaaaaagacgatgaagactaaactaattataatcaatccaattatgatccagctagcggttaaaccaactagttgcacgcccatcaagaataaaagcagtccgattactaataaagtagcaccagggatatcgaaaaccggtgtcttttttggagtaaccggtttgtagtaaattaaacaaatcaaaaatgcaattaagccaattggaatattgatatagaagacccagtgccaagagaaagcatcaattaaccaaccaccaacaagtggccctaagatcgcagccccattccagctggcagttaaatagcctaatactttggttctcgttttaatatttttaaacacataaccagcaatgatataaggtaaagaacccataccacctgcaccgattcccatgataaagcgagagcacagaaagaaaataatatttggcgctatcccttgtagagccgatcccaaaacaaagagtagcaatgaaagctcaaaggctcgtttgttagtgattttctctccgatcttggtccaaatcggaatcgaaatcgacattcctaataagaaaattgccacaatccaacccatgaattgaattccgtgcaaggccgcgacgatggctggaatagcggtattaataatagttccgtctagccccgacatcacgttgccaagcatcaaggctgccgtcaccattgtaatctgttttttattcatgcttaacttctttctatggtatgtaaaaagcgttagacaaaaatttctaacgcttttgagtaaaaaaatatggaggatacagggctcgaacctgtgacctcctgcttgtaaggcagatgctctcccagctgagctaatcctccattatggggcggaatgtgggaatcgaacccacgcatgctggatccacaaaccagtgtgttaaccccttcaccaattccgccatcaacggtccatatgggatttgaacccatgatctcctccgtgacagggaggcgagataaaccactgctccaatggaccaaactagaggaggatgtgggatttgaacccacgcgcggcagaaccgcctaacggttttcaaaaccgtccccttaagccacttgggtaatcctccatagccgaacagatactagtataccaaagtgagaagataacgcaagaccttttttaaaaaaaagcaaaaaaataaagcctttcggcttcattaactatgtaaatttttctggaacagcaaatacttatattctttgccagcaatttcaataaaacgttgggtagcaatattacgccagccaaagtgcttaaagaattcttgtgcatctttatcttcagccagacaccacaagtaaatcttgccatagcccatcttcttcagttcattttctgcggcatttagcaaggtcttacctacattgtagccttgaaaatcaggtttaacatataatgccatcaactcaccgcagccaagcattctagtgtcacgtggacgaccatagctaacggctgcttgaacctcgttattatcgtctttaaaaactaaattatgacgaccactctcattgagtcgttttacccaagcagtagccggaatattatccaaaaatacatctggtagcacgcctttatacgtctcttgccaagttgtttggaaaagcttacttgtttgttttgcttcgtcttcactaattaatggtttaataatcatatttacttcttctttgtcaaaacagtcacagcctctacatgtggcgtttgtgggaacatatcaacaggatcgattcgcttaaattcataaccttgttcttggaacaaaagcaagtcgcgaatcattgttgcaggattgcacgaaatataaacgaccttcttaggtccagtcttaactgtcgcattaataaattcaggtgtcaacccttttctcggtggatcaacaaaaaccacatcggtcttcataccctttttagcccaacgcggcattatttcttcagccttgcctaagtaatactttgcgttttcaataccatttagctcggcattgtccttggcatccttgatcgcatcccggacaacttcgattccacgcacggccttcacatgcttagctacactcaaaccaatcgttccaattcccgaatatgcatcaattactacatcatccgaacctaaatctgcttgcttaatcgctaaatcatacaagcgcggtgtttgcagcgaattaatctggaagaaactttgaggtgaaattctaaactttaaatcaccaatttgatcagtaatctggtcattaccgaaaactaggtaatcctttttacccaaaatcacattggtcttcttaggattatagttcaagactaaacctgaaaccttaggaatctggctaatctcagctgcaacacccatcatttgtgggaaatccttaacccggctgaccaaaatgaccattatctcgccattagccttactacgacgcacatcaagatagcgtataattcccgtattgtttacctcgtcataaggcgcaatcttgtacttgcgcaacacatcacgcactgcaaccaatacacgatcaatttccggatcagtggtaaagaaatttgtcaaaggcactaaatcatgtgaatgtcgtctaaaaaagccaatctcaagctgtccattatattctcgcacaggaacttgggccttgttgcgataccctgtttgctcaggactaggcaaagtttgtcctacttcaatctcatctaaatgtgccttcttaagtaagttaacaacttgattacgcttgaattcaagttgcttatcatacttgatatgagctaaagaagcgagtcccgtttgaacccattgattcaacttgatcttaactcgatcaggactttctttttttatttcttcaattttagccaaagcaaagttcttcttaacctttaaaatctttgcactaaccacttcacctggaagtgcattagtaacaaatacggtcattccctcgtaatgggccacacccattgcttcatacgaaagatcggtaatttctaaatctataatttgattctttttcatactcactcaaccttaaaaaaatagctctctattattataatacttgaccaatctttgtgcttcaaaaaataatcgactgctttttagaaccaactatcacccatatacgcatgcaaaatgtggttagccgctactttcaacctcaaataattaatattattagaaaatagcataatcatacgcttggtcttgtaattcgcaacaaagcagcaattataaccagggatactgccattagcgcgaatgatgtcaccattaaaatacactccaccaaaataagctaccgtctgatgctgggcttggtggtaatactcgtttaccattttaggatttttcagcacatcgttatatacaaacttccaataatcaattggtgacatgaataagttccctgctccaaagtccgacgacgtcgtcactgtcacttggtgccagtcaacatttttactcattggctgagggatctcgttttggttaacctcagaaaaatccttaactttctggagcttaagtggcttagcaaaatcggtctgaatataagcattataacttaaattagtttgtttgctaataatagctgctagcaattcataatcaacatcttggtaatcccaagtatgaagatgatcattctccatgtgattaagcatataagctatttgctctttctgatttttaagcggagaagatggtcgagcattgttaaccaagccactagtatgattcatcagctcacgaattgtaatatctttactacctgaaacttgaggataatagttagataaagaggtattccaacctaataacttttcttgttgcagctgataaattgcagttcctgtcataattttttgtagcgaagcaatcggaaacaattgattagcgttaactatttggcttgaatcagtggtctccttattttggacaacaatcggttgcccctttttatcattaattaacattacaccgttgatatgatgaaacttcatataatcatgcagctgttctttctgattcttaatgccattatccagcttatcccctggctgcacaatgaataaaaatattgcaaaggcacaaagtgccaaaaagatggataaagctcgttttttatgcataaagattcctcttaattactatcccaagcaatgtaataactatatttcctcaattgtaaatctagtatctaaatagattcaactattgtgtgattttatgcaatgaaaaaacatgcttcattagaaacatgttttttcaagtcattttaataaaaacatgaacagcataattaccgcaataaatttcactgctcttatttcatgcactatactaaaaatagcttttctataaatacgtcacattcaaaaagattttgcttaaatctattgacagatatttttaatcttgctatcatattgctcaacaagaaacgaaaagtagcaactttgctcagcgttcagagaactggtggtagctgcaaaccaggcaggcaaagcttgacgaaatacatcgttataatgttgttcggaaaaattcagaaccgttaccatctgatagagattcaagttcttatgcttgaaagagtgggtggtaccacggctattgtcgtcccgttgactaataagtcaacgggattttttatttggaggaatataaaaatgaagaaaaagaaagtttcctttactgaatcaattattatcttaattgcactcctcactattctgggattggcagttatcaagcttgccctttctccagaagtgccagttttattcattgtccttttacttaccttttgggctagactgcgtggcttttcctggcaagatgttcaagatggcatcaaagaaggaattagtgtagccattattccgatttttatctttattttaatcggcgctttgatcgggatctggattaaagcgggaattatcccttccatcatggtcctgggtttccacttaatcagtggtagtttcttcgttccatctgtttttattgtttgttcaattattgggatggcaatcggtagtggttttaccacaatctcaactgttgggattgcgctttttgggatcggaactagtatgaaccttaatcctgccttagttgctggggcaattatctctggagctgtttttggcgataagatgtctcctttatccgattcaaccaacctttcttcagcagttgccgaaagtgaattattcgcccacattaaaaatatgatgtggtcaaccattcctgcttttgtagtttcattaattttattctggatcttaggcaacagtggcaacatggatccaactaagattgaacgtacttcacatattttacaaactaacttcagtatcagctggtgggcaattgtcccaattatcttgatgatcttttgtgcttggcgcaaaatttccgcaatccctacgctctttttaaacattgcgattactgtaatcatgatttttattcaaagtccccacgaatctattcaatcgcttaacaatttagttatgaacggctttgtggctaaaactagtgatgcttctgttaatgccttattaacccgtggtggtatttccaacatgatggctacagtagctttgatcatttctaccttatctttgggtgggatgctcatgaagttcaacattgttcaaagtgcaatggaaccactcgttaaacatttaaccaagcctggtcgtttaattacggtcaccattttatctggtatctgtatcaacctttttgttggtgaacaatacctatcagttatcttacctggtcgtgcatttaagccggcttttgataaaattaagctttcaccattagcccttagccgcgtacttgaagacggcggtagcgtaattaactacttaattccctggggtgttgccggttcattcgccgcttcaactttaggtgtgccagttttacatttcttaccattcgtcttcttcagtcttctttcaccaatcttctctattttgagcggaatcaccggaatcggcttgaagtgggctaaagaaaagtagaaaataatcatatcagtaaaaaagttcctaagaccatcgtctttaggaacttttttacgcaatctactagctaacggttgtgtcatgttgcaaccaattattactcttttcttgacattaccattcgatcattcacagcagctctttttggtatcactttataacctcgtcaaattcacttcaccagccttcatttttgggattgtctttaccgtaattaggaaaaatgaccagcaggcaaaattacctttaaaatcatatttttccgaccagtgggataataacttctttcctacttttgcttggactttattttatctcattgctatgcctaatctgcagcaacacgggcattttcacaatattgccacattcatctggcaattcttcagtgataatgccacacctcatctttggtacagcgtcatgatgctgcaatttttgcttatcatgcctggaatcaaatcagtctgcaactgggtccagcattcttatcgacgactactaatcgcagttattagttccggaattatttactttgcctggttaattttttatgatcacttcattttaaatggtcccgaggctacccattggtatttattagatcgtatctttatcagctttttgatctttgggctctacggtggcttaagctggaattttcatcatgaaattcaaacttttctgtttacatattggtggctaattgtgggattttaccttttaacctattttgggaccagagatttatttttagccactttcaaattaacagacctaaccaacgacagttattacctaccttcaatggcaatttatgctttagcggttatcctcttgatttacctaatctgtattgcacaaaaagtctttaatatgaactactggctaaaatcaattcactttctagctttttatgcttatcgagcatttttagccaatgttttttgggatcgtatcttttggcaatattttaattttaaacagctagctttacaaaatatttatttagctgtcttactactttggatttgtacatggtgtgcttcatatttatctgtttatgtagttcaccacctttggcttaaaattaatggttctgtcggtccatcctaatttgcgcacgtcgatattcctgactgtcacgcgtaggttgagcaactatatctgtaattattatttcatgatcatttcgttcaaagacgattgcttggtctaattccgcatttacttttttattgatagtggtatcttgattaaattttaaatcatccagctcccgatcaataaatgttttttgcgaactcgtcagctgatgatatttttctgccgcttctggagtaaaggacaagatcgtctcccgtctgaattcacctattttatctggatattcacttctttgaccacggatgtcattgtcaatatatcttttttccatcaaaatcacttcctttatatcttcactatacaggaggcgattttctttagacatctttctgcctactttagttttttcataagaaaaactttactattattcatttgaccactaaatacggtaaaatagataagacaagtaaataaaaggagtgtatatttcatggataacttttcaaatactccaggacggcgtcaagtccaggatatttctgcagttaacagcttcttgactaagatgtacagtctcatgattttggctgttttagtttctgcagcaactgcattcttgactacgactgtgtttgcatctgcaattgctaacatgtcacaagccgtttactggatcatcgtatttgttccaattgttttatgtatgacaatcagctttaaggcagcaaagaacccaacattaggcatcgttcttctgttgattctttccgcagtctacggcttcgaatttgcctttatcgcaggagcatttacttccgcttcaatcgctggtgcctttttatcagcagctggcgtgttcgcagcaatggccgtcttcggttctgtaactaagcgcgacttgagcaactggggttcataccttggcgcagctttgatcgggttcttagttgcatggctcgttaacgccttcttcattagaagtggcgctgcaacctttatcttctcctgcatcggtgtgttaatcttcactggcttaactgcctacgacgcacacaatgctaagaagattttcatgacctacggcggtcaagtttcagatactggtttagccgttatgggggctttaagcatgtatctcgacttcatcaacatcttcatgttcttgctacaaatctttggcatgggcggagatcgcgattaattaatttccatacaaacatagcgttgattagcttttacactagtcaacgctatttgttttgcttaaattttatccaccaacataaaattcgatatgttgttgtaaattgttgaattcaactggacaataaccaccaatttcgccatcaaggttaactggcaaatcttgtccttcacttttaccaatcaattccgccttcaagctgcgggtcttggtataaatgatatttggatcatcaacgtgcttaccattcaaagccaatgccatcaacttcatcatgctaacagggtcagaaggcttgaccacgatcaattggaataatccatcactaagctgtgcatcaggcataacttgctcaaaaccaccaattgaattagtcattcctagtaggaacattgataattttccttcataaacgccatcatcataagtcaaacgcatctcattctcagtcaagtgtggcaacatttctgcccccttgattaagtatgcggcataacccaaagctgacttaacctcagatggtacgccatatgttaactcagttaaagaaccgctggcagcaatattaacaaaatattgaacctggtcaccaaaaacagctttaccgatatccattttacgagttttattctttaagattactttagcagcatctggaatattatcacgtggaatggctaatgcacgagcataatcattagtagtaccagcaggaataattgccattttaggcctgttttctaaaaaggcaatcccgttaactacttcattgattgtaccgtccccgccagctgctacgattaaatcaaaaccttccttagcagcacgagtagcttcattgcgagcactattttctttaggtgtagttctaaaagcactagcttcgtagcctgcttgttctaatacatctaaaatatcggccacattctttggcatctgttcgtgacctgatacaggattataaattaatcttgcttttctagtcataattactacctaacgttctaaaaattaacgactttgcaattcttggttaagtaacttgttaaccatcttagggttagccttaccacgagtttgcttcatgatttgaccaactaagaagccgattgcacgatccttaccattcttaaagtcttcaactgattgagggttatcatcaacaaccttcttaaccattggagctaaaacagaagtatctgacaattgaaccataccattatcttcaacatacttcttaggatcagtaccattttcaatggtttcagcgaagaccttcttagcaatcttagatgaaatagtaccatccttaattaacttgatcatttctgccaagtgttcaggcgttaacttaatatccttcaattcaacacggtgatcgttcaagtaaccattaacttgtgtgttcatccagttagctgccagagttggatctgcacctgccgcaacagcttcatcaaagaagtcagaactttccttagtttgaagcaaaacgttagcgtcatatggcttcaaaccatatttatttacatagtcatcgtaacgagcaaatggcccctttggtaattccttagcaatttcatcgatccattcttgtgaaatatgatctggtgcaatatctggttctgggaagtaacggtaatccgatgcaccttccttaacacgttccaaaacagtcttaccagttgcttcatcaaaacgacgagttgaaagttggatgtgaccaccagccaaaagaacttgttcttgacgcttttcttcatatgcaagtgaacgacgtacgtgatcaaatgagttcaagttcttcatttcaaccttagtaccaagttccttttgacctgcaggacggatagaaatgttggtatcaacacgcattgaaccttcttccatcttaacgtctgaagcaccagtaaattgaacaatcttacgtaatttttcaaggtatgcgtaagcttcttcggggtcttccatgtcaggttcagaaacaacttcaagcagtggaacaccttgacggttcaagtcaacgtatgagaaaccgttggttccgtgagtgttcttaccggcatcttcttcgatgtgcatttcgtggataccgattctcttcttcttaccgcgaacttcaacttcgatgtaaccatcacgagcaagtggttggaagaactgagtaatctggtaagccttggggttatcaggatagaagtagttcttacgatcaaaatgagtagttggcaaaatgtgagcgtgggttgctaaggcaaccataatacctaaacggtaaacattcttgttaaccattggcaaggtaccaggcatagcccagtcaataacattagtctccgtgttttgttcagcaccataggttactggtgaaggagagaaaatcttgctctttgtctttaattcgaagtggacttcaagtccgatagtcgatttaaaattcattcaattagtcctccattccagttggtgttttttcataaaacttgttagtgcgttcgataaagtcagcagtcttgaagacattaccttcatcaaaacgcttagccataacttgtaaaccgacaggcatcccatcaactaaaccagctggaacactagctgcaggaatacctgctaagttggcagaaatagttaaaatatcattgttgtacatcttaattgggtctgaaacttcttcgccaataccaaatgctggctcagtagtagttggtccaacaattacatcattttctgcaaagatcttgtcaaagtcatcacagatcaaggttctaaccttagcagcttgtctaaagaaacggtcatatgaaccagctgaaagggcaaatgaaccaagcataattctacgcttaacttcagcaccaaagccttcagaacgtgatttaacgtaaacatcaagtaagttcttagtgtccttagcacggtagccgtaacgaataccatcgtatctttgcaagtttgaagaagcttcacttgaagcaatgatgtagtagtcaggaacaacgtatttagtatgtggcaatgaaacctcattgatcactgcaccagcatccttcaaagcatcgatttgcttttgaataacttcacgcatttcgccgctaactgcttccatgtattccttaggaacagctacacggagacccttaacatcttgaccgataaacttggtaaagtcaggtacttcacgggttgaaacagttgagtcatgctcatctgcaccagcaattacgtttaatacttcagctgaatccttaacgcgcttagtcattacaccaatttgatcaagtgaagaaccaaatgcgataagaccccaacgtgatacacgaccgtaagttggcttaataccaaaaataccgttaaatgcggctggttgacgaattgaaccaccagtatctgaaccaagtgctgctacaacttgaccactagcaactgcagctgctgaaccaccagatgaaccaccaggaactttatctaaattccatgggttgtgagtagcaccataatatgagtgttcagttgatgaacccatggcaaattcatccatgttggttttacctacaaaggttgcaccagcttttttaagcttagaaataactgttgcatcatacattggcatgtagttgtacaaaatgtgactagcagcagttgtcttaatcccgttagtgatgatgttatccttaattgcgattggaatacctgctaacttactcttggagtagtcaaggttatctgcaggcttagcatcatctaaaacagtgatccaagcatttaacttcttatctgtatccttaatgtttgccacagtgtctttagctaacttatctgctgacaagtcaccgctggcaagctttttgtttaatgaatcaatattttcgtttaagtaattcattactcgtcctcatccttattaataattacaggaaccttaatgtagccgtttgccttttcaggaacgttagccatcaatgtttctctgtcttgtccttgccagtgttcaggtttatcttctctgaagacagtatcacgatcaacaacttgaactgtttcatcaacaccctcagtatcaacttcactaagttgatcagccatattgataattgatcccatttgatcagtaaatttatctaattcttcttcattaaacgcaagtcgcgaaagagtcgcaacgtgtttaatggtatcttttgtgatttccacgcaaatacctcctattcgccgccataaacatggacttgataatcactatcgccggtttcttttgcaactaaagcttgtacatcatctactgaaccaattttgatttcaattgggatattgccagacaagtactttttagctgacgacaaaaccaaacgggtaaaactttgaatttgttcatagccataaaattgcgttgttacggaaatgttttcttgtgaaagcttaccgtttgtataacgcaaagttgccgttaccccactaatattagggaagtagttttgaatagccgtcttgaaatcattgaagtgcgatgcatcatcactgttaattgctttttcactaccagttgtcggtaaaacttgcattttttccgacatggatttccatttagatattttactactattagcggccgctgtcccgtaagcgaagtaagttccaccaactaatgaatcttttccagtcttggagaataaaccaatcgtaatcggaatattctttaaagctttcttcttacgcaagcgagcaacaatttcattagctattttttcaccttgagctttttgttcagcacgtgaaatagtagtttgaaattctgcaccgttacgctttttctgataataatcaaccgaattcatggctaagcccaagctcataccacctaaattatacttggaaccagatccagtcaaataatcttgttcgataatttcttccaaataaattggattacgcgtatcggttccggtcttaccattatttactgggtttaaaccatcaggatttgatttggatttacgcattaaccaatcagttacagttgaggtatccaaatattgtccttcttggaagacgtattgattaggcgaaaattgattcttagaaatttgaatcagccctcgctctaattcacgcgtatcaacagaattatcattatcagtagctgttaatcctgcaatcggactaatattatagcgaccatttttcattaaaacggtatagccattcgttcccgtgttagtagtttgatagctttttttcttagtggttgaagtggttgtcgcattatttgctaaactagaatccttcaacttaccacaaccacttagagtaagcgcgattccagctaaagccattacttgcaaatattttttcacaataattgtcctttattcaatttgtgcaattgcttcttcttcagtcaaaagtggtacgcctaaagtctgcgctttagtatacttagaaccagcatctttgccataaatcacgtaatcggtcttatgcgaaactgaacccgtaactttggcacctaaagcttgtaattttttcgtaaactcacttctagtataatgctctaatttacctgttagcactacagtcttatccttaaatggattatcttcaatttctgcaggctcatctgcacctaagtaatccatattcaggccgctctcacgcagctcatcaattaccttctgtgcttctggttgagcaaaatatgttgtcattgattccgcgatcgtcatgcctattgtatcgatagaagctatttcttgcacgtctagagacataatctttgccagatttttaaacttttgagcaattaagcgtgctgctttggccccaacatggtcaattcccaatccagtaatcaataattcaactgagttttgctttgaattgtctaaggcagttaacaaattattgatcgatttttccttaaaatgatcgagttgtgctaaatcatctgcagttaagtgataaagatcagccacattatgcactaaatctttagcaatcaattgtttaacgatctttggccccaaaccggcaatgttcatagctggtcgagaagcaaagtgcgtaataccctcctcaacttgagctggacaagatggattgatgcagcgcaaagctacttcatcttctaggtgaactaatttttgcccacaggatggacaagtcgttggaatctgataagctacagaatctgccggtcttttagccatgacgacttcagagatttctggaataatatcgcctgctttatgcagtttaacggtatcaccaatcctgacgcccttttcattcaaataatctgggttgtgcaatgaagccctagctacagttgtaccagctagttgcaccggatccatgaccgcagttggagtaactactccggtacggccgacagtccaaacgatatcccgcactacagtttcttgttcttcaggtggaaatttataagcaatttcccagcgaggcaccttaacagtgttaccgagctcttgttcaattcctagatcatcaatttttaacacaatgccatcaataccatatgttaggctgtttcgtttagctgtgtattcatcgataaaggcaaaaacttcatctaatgtttttaacttacgaccggtttcattggtatgaaagcctaaatcatgcattttttgaattgcttggtgctgactagtaatttcttcaggcggattaacccaagtataaataaaggtactaagttgacgcttcttggtaactttaggatcaagttgacgcaaagaacccgctgcagcattacgtggattagcaaaaactactagaccttgctcttctctttctgcattcaacttggcaaaggcttccttgcccatgtaacattcaccgcgcacttcagttgttaacggttcaggcaaagtctgtggaatatcactaatatacttagcattagctgttacatcttcaccaacataaccgttaccccgcgttgaggcacgaaccaacttaccattttcatattcaagcgatagtgataagccatcgatctttaattccacgttatattcaactggatgaccaactaatttttgcatccgttgatcaaaatccttcagttcagctttggaaaagacgtcccccattgacagcattggaatcgggtgctctaccttggtaaaatcactatcaatctgtcccccaactctttgggtaatggagtcgggtgtcacaatctctggaaattctttttctaattcaagcaagcggttgtagctttggtcgtaaacattgtcttcaacctcaggcgcgtccttagagtaataggcctcagcccattcattaagctgttttctaagtgaagccgcttcttttttagcttcatcaagagtaatttctgccatttttccctcctgatccaaatcaatctttctttaattatatcttcttaattggcgcaaaggcagccaaaagccgtttgattcctttaccagggaaagcaatatccagctccatatcttcaccagtgccattaactttagttacaacaccatgtccccaagctttatgctcgacttggtcgcctacattccagcccttcttttcagcaccgacagcgcctgaagctttcttagcagtataaacttcagcgcgagctcgttcggctttgcgagcaaatggtgccgtctgtttctcaaagctagattggataaagctgctttgtaatttttcattttcttctttgtgcagatcctgttcatcaatttcgtccaagaatcttgaaggcggattattttgcattctgccatacatcatccgtgagtaagcattagttaaaaacagttcttgcttagcccgagtaattcccacgtaagctaggcgccgctcttcttctaattcattgtcatccatcattgcacgttgcaacgggaaaagcccatcttccatgccaattaagaaaaccactgggaattctagtcccttagctgcatgtaaagtcattaaagctacttgattgtcatcttcatcaagatcatcttgatcgctaagtagagatacttcagccaagaagtcgcttaatggattagactcatcttcttcgggctcataatgatcatcaaaacgcttagtaactgacaagaattcatccaagttttctaaacgcgtttctgattcaattgtattttcagctcgcaaggcatcggtataatcaaaatcagctaagattttttcggttaaaccggttactgtaccattttgagcataagcaattgcatcacgtaatttagtaccaaaatcgcttaatttcttggctgctctagtattaattgaactttcagccacatgtcccatcgcatccaaaatgttgtagtgattctcatccgcaaatgttaacaacttatccacagtagcggcaccaattccccgctttggagtattaataattcggttcatactcatcgtatcagctggattagcaactaacttcaagtaagccatcacatctttaatttctttgcggtcatagaatttatgtccaccaacgatttgataaggaatattgcttttaacgaaagcttcttcgactgttctagactgagcattagtccgataaagaattgcgaaatctttgtaagcccgttttttatctttaacttcttcttggatctttgaaatgatgtagtgagcttcatcatcaccgctttgggcttgatagtaggttaccttttgcccatcaccttgatcagtccacaagttcttagccttccggttctggttatttttgatgaccgagttagctgcggacaaaatgtgaccagtagaccggtaattttgttctagcttcacagtcttaacatcatatttcttgtaatcctgctcaaaattcatgatgttttccatattagcaccgcgccagccatagattgactgatcggcatccccaactacacaaatattcttgtattgtgcagccaaagcatgacagagttcatattgagcctggttagtatcctgatactcgtcaactaaaagataacggaacttgttttgataatagtgcaaaacttcgctatcttttttaaacaaaactagggtctgcataatcaaatcatcaaagtccataatttgatcacggcgcaatctacgttgatattcttcatacaccttagccgccatcttctcaaatggtgacaatgcactctgcataaaagcttcaggatccagcaagtcattcttgccattagaaatcgcggctaaaataccgcgtggatcatacatcttaggattgatattcaagtctttttcaatatgcttaaccaaagttaattgctcggccgaatcagcaattgaaaaattatgaccataaccaatcttatctgcatcccgacgcaagatccgcacacacaaagcgtggaaagtcgacatccaaatgtcgttagctgctggtcccagcaacttttgttcacgctcacgcatttcactagccgccttattggtgaaggtaatggctaaaatattccaaggtgcaacatgattttcttcaactaaataggcaattcgtctcgttaaaacagaagtcttacctgaacccgcaccagcaacgactaataaaggtccttcagtggtttctaccgcttctttttgttgcggattcagaccagctaagatagatttttcgctcattattttccccttcactaaaaattatttcattaatgcaacttgaatattataccaaaaaagcagcgactaattcgctgctttagatttacttatcatatttttcaagatcaaactgttcaatcaaattaatcagcttatcggcatagtccggatcagtcgcatagccgtcggtaaccaaggctttagcttgtgtcttataatctttggatgctagaacatgcttatactgatcgtggttccacgttgtcccattctggaataatctagcgtgagcccgaatagaagcctcatatgagtcatatatttggaaacgcgccttcacggtaacccacttattctttacatattccttagttgtcatcactgccgaagtgttcgggttggatcctttaacaccaaaaagattgttgtatttttgcgacaaatcactttgtccataattactttctaggcaggcttgagcaatcgtgatgcttggcaataagtcatacgacttgtccacttcgcgcgcaatcggaccaatttttttgataaagtcttttttctgttttaatagttttgctgcttcctgttctttttgcagctgtgcttgttgaatctgctctgattgaatcgcgtaacgcctataatatctaaagccgacaaaagcaaccatcagaataaatagaattacgaatacacgcacaacggttttgacactttttggtactcttgatttacgttttcttgccatagttttattccctttaattactaattaaagtataaccgatttttgagtaaaaaaaaagaagtcgctcactgcgactcctcaatcagtgcgggcgagaagactcgaacttccacgatctaaagcgatcacaagatccttagtcttgcgcgtctgccattccgccacgcccgcggcacatcaactataatagcctaaatacagttgagatgcaagaaaaaatataaattattttaaatttctgatcattttacgcaaaagtttgcgctaaacgcaggtgtcccctacatttaccacaacgatacttttgtgtattaatcctgcgcattcttgggtatctcaacccacagttttcacaaagatataggtaacgatattttttctttttacgtaagccaatatcaggtgcataacgactgcctccaacttttttcagcaagattttaaaattgcgatcacggtgtcggtaacccaagcccaataaatgcaaatgatagtgggttaattcatgcttaatgattcctactagataatcatgatattgtggtactaaaaaatgcgcgttgatttcaagatggtgatcatccaaatgataacgcccacctgttgtggtcattcgccgattaatttttacaaggtgcttaaaagggcgatcaaaatattttaacgaaattttttcaactaaattttgtaattcattctcattcatggataaaattttattccaaaaataaaaatcagcaagaatttaatctcgctgattttttgctacctaaatatcttggcatacatccccgcctgcttaggcgtactaatgtgtcgtttcaagaaagttactaagtcatgtttgaatgactttttaccatccatccaggttccagtgaataagtgaatcgatttggagtccttagaaggattacacagaactccatctgaatagacatgaatgccatcttttaacacttgctcctgattacctagctttaagccatacttatttaccagcatttcagtaacggaaatactatttactcccgccatctgattcttagtgtcatattcaaaatcacgatcttgataataatccaaaatatcctgcataaatgggtggcctttttctgcaccaaaaattgcagctgacagataatcatggttttcaaaaccaataaaggcagaagcattcaaaagactatctaacttatccacgactctaacatcagtatctaaatatatcccaccttgttcataaatagcccgtgctcgaacatagtctgacacgaaggcccatttttttgcagcataagcttgttcaatataacgattctcatgcatatcaaaattatcttcattccactcaataatttgataatcaggcaattttttcttccaggttgcaatacattcttcaattatcggggatttaggattgtgtcctacccaaacataatgaatttttttaggaatcatttttaacctcgcttcaaaaagttcttaattagcttcacaatatcatcattaaaatcaagcttgaacaagaacatcaatgtcagataaataattaacatgacaattgacttaaaagccatatcgaaaaaggcagatggaattatattaggcataaacattccaatagccaaggttagcaccgcaattaacaaatacttgggcacgtcatggaaaacataactaaattcatagccatcacgtacaacccagagccgcaaaattaaaactactgcttcagtaattaatattgcaatcatagccccacctgcgccatatggcctatctaagagataactcaagacaatttctaaaattgccccaataactactggcacagcataatccttgtctcgctggttagccaaagcaaattggttagcaaataccccgccagtcggaatcatgataattgttaaggtaaaccaaaacattaatggagtcatcggaacatatttattcccaaagaaaaatggtacaaactgtttggtatttgccataataattacggcgaacaaggtacccagcattacagtagcttccagtgattttttcatcactatcttttgtgccttttttccttcgctcgccatcttaggcataatgactagcgaaatactggtaattacacccagaatcatatttgaaattcgttgtgaattgtcataaaaagaaacctgagtcgaattagaaaaccaacccaaaattggtttatccagcgaagtataaatttgagtcgcaatctgtggaatcatcaaagtaccaattgcaattgccgtctgtttaaatttgtaaaaatgagcaatgggttttcctacatagcgccaaatatcaaaccaaaagacaaaggaacctagcattgtcgacactgacatgatcaataaatatttccacaagtcagcgggtgattttacccataataaaattagaaccacactaactaactttaccgccgtgtttttcaaaacaacacgaccaaagtcagctagtccttgaaagaaccatgaaatatcaacctgtgctgagatcaagtatggcaccatcaacaagatataaaaccaatattgaacgtgaaatacagtcgctacaaaaaccgtgactaaaatggtgataataccggcgattccttggaaataccataacccccagaaagcattggttagctcctgcggtgtaccataagtgcgcgtccgtgaaattgttcgcatccctacatacgacacagacagaatacaaaaaatcatcaagaattgcaccgtattgttcacactgctataaatcccataagtcttaggacctaagacacgcgataaatacggtacagtaatcagtggcaccaatacaataaaaatctgataaaccgcattatataagatgtttaaaaatgttttacgcattttaacctcgatattcctgcgtcatgtacttaaagacgttctcacaatatgaatcaccatgcacctggttagtcaaatgtagccagtaaagacggcgattagcaatctgctggttatcaagttgatccagattgcgaattagttcatcctctgaattaacacagattccgggagtaatctcagcatatggtcccattagtaatccgcgcgttttttcatattgctctaaaaagttagtcacaaacacaatcggtttgttcaagtgcaagtaatcaaagtagattgacgaaaagtctgtcatcaagaaatcagtatcaccgagcaattcgtacaaatcataattgtggtcaaacaagtaatcattgttcatgaaagcaatgttagaataactgctcttgaaattggcaaataaacgcatttcatagggatgcaattttacaatcagatattgatgccgcttctttaattctgtatttaatttttcaacatcaaaatcccgaaaggcaaaaaagtttctctctttgattttctccataatggatttatcttccaattcataacgaaaagttggcatatagatcccgatctgtgcctgatcgtcctcagttttaaataagtcagccaacaattgtttcttcgaaattaccggcttagccaataaatccaaacgcggaaagcccagcttgcggtatttttttgtctcaattgccatacaagcactcattagtgattcatatagatcagagctagaagcaacaatatccgcattcttgtgccacaatttttcgttacggcgattgtcgcgtcgcttagtattattagccataattcccatgcgcttgagtggaacgccatgccacaactggacattaatttgatgcttgcgcaccttaaatggttggtgcgttgtaattacatatcgcgctgctccgattttctgccaggttttccacttcaagtgtgacgatggccacggctcaactaatgtaacgttatattcaggatgattcaattgcagccacttgtaaaaagcatagccgttagatccagacctacctgaaccattcaggataaccacattattgttttccatcgtggtaaatctagccaaaaaactcatccaagccaaataaagacggaataaaaagcttttcattaaaatacttccttaaaatagtctaatacctaaagcatataaaaaaagcttgagcaaactcaagcttttttctttatttttgttaaactttattctttacccatttttctctggcagaatttaacaatttcaacaatcaaaaccatcaaaattccggcaattaaaatgactaaccactgtggtccatcaagttcagtcacatcaaagaacttagtcataaatggcaattctaccgctgccataattacagcagcaatgataattgcaccattgaaccacttgttagaaaaagtatgcggtctaaaaatcgactgatgtacatacttggaattaattgcatggaacagctgaatcaagcccaaagtcaagaaggccattgtcaatgcatccccatgttgcaacgatggatcacccacatgtggaccgacatgcaaaccaatttggtatgcacctaaaactaaaattccttccaaaattccttggtaaataattgaactggcaacaccaccgctaaagaagttagacttcttaccacgcggcttgcgcttcataattccaacttccactggttcaacacctaaagcaatagctggcaaagtatccgttaccaagttgatccacaagagctgcacaggagctaagatatcccaacctagcattgtcatcatgaaaactgttaatacttcacccacgttacaactcattaaatatagaatggccttttggatattactgaagaccttgcgtccttgctttactgcttcaacgatcgtggcaaagttatcatcagccaaaaccatatcgctggctcctttagaaacttcggtcccagtaattcccatgccgattccgatatcagcttgcttcaaacttggagcatcgtttaccccatcaccagtcattgcaacaatcttgtcattagcctgccaagccttgacaattctaaccttgtgctctggtgaaacacgagcgtaaacgctgtagtcaccaacatgctgtttgaaatattcatcatctagtttatcaagttcagccccagttaaaacgcggctatcctgacctttttcaataatacctaggcgttccgcaattgcttgagcagttgtttggtgatcaccagtaatcattactgttctaataccagcactctttgcttcagccacggccgctttagcttcaccacgttctggatcaatcattccgactaacccagcaaaaattaaatcttgttcaacattatcagttgttggatcggtgtacaattggtcgactttcttataagcaagccctaagacacgtaaagcttgttgcgccatctgcttgttttgcgctaaaatattttgcttctgcttatctgtgatcggctctacttgaccaccattttcaatcctagttactcgctgtaacaacatatctggtgcgcctttgaccgctacaaagtattgctcgccatctttattaacagtactcatcaatttccgttctgaatcaaaaggcacttcttgaatccgtttgtatttttcaagcaagtcagttacatcaatgttttgatcaaaagcaaattgaatcagggcggtctctgttgggtcacccaataagtctccgccattttcaatcttagtatcattagccaaagtcattgccaataaagctgggttattttcgctaatactttcactattatcatgtaactttttatcatagaagaccttttcaactgtcatccggttctgggtcaacgtaccagtcttatcagaacaaataatgtctgtagcacccaatgtctcaacagcaggcaatttacggacaatcgccttatgtttggccatcgtttgcgtacctagtgccaaaataatcgttacaattgctggcaagccttccggaattgcagctacagccaaggaaacggcaaccaagaacatgttaatcattaaagtagagttacgctctgctgaatcagccttgagcactcctacgataaagacaataacgcagattgccaaaatcatgatggttagggtctttcccagttgattcaagtttcgctttaacggtgtatcagtttcatcagcattgttcaacattgtagcgattttaccaacttcggtgtgcattcccgtactagttacgattccttcaccacgaccataggtcacattagtattggaataagccatatttacgcggtcagctaaagcaatgtcttcaccttctaaagtttctgcatgcttttcaactggaactgattcaccggttaacgctgattcctcaatcttcaagctgtgggcttgattcaagcgtaagtcagcaggaaccacatccccagcttctagtaaaactacatctccaggaaccaattctgtgcttggaatagtaacgattgtatcatcacggcgcacatgcgcatccggcgtagccatttccttcaaagcatcaatcgcagcttcggaacgtgcttcttgaaagacacctaaaattgcgttcaaaatgaccacaatcataataattgcggcatcagtccactcatgagctaataccccagacaaaatcgcggcaatgatcaaaacaataatcataaagtctttgaattgatcaataaaacgcatgaacatgctttgctttttcttggaagctaaggctttcggaccatattgctctaatctagctttggcatcactagcacttaacccatccttaacggacgtgttaagatctttttcaatgtcggggatcgactcgacataatattttttcgccattttccctctgctatataaaacatagaaacatgcagaagtttgatattttccacataccagaaaaaaatatatttttcctttcctaattttatttactgtcgtcatcattggtattccgatattccatctggggagtaatcgcattgaccaactcctgcagcttaagggcttagccagccccattattttttattttgttaatgccaataaatttaatactgcattgtcatcacgatcattgctatagccacactcataacaaacatattcattgtgcttggtgccatgttttctattgccctgcaaagtgattttgtctgcaccatttttgacatagccgcaactggcacatctttgcgttgacgggtagcttctatcagccaaaattagctctttatcataccaagcacatttataggataatatctgtctaaatttgccaaacaaggacctctgtatgcctttggaagccacatgcgtcatcatcatttgcttgacattcaagtcttcaatgacgatttggtcataattatttgccagctcagtagtaaatttttgcaaaagatcattctgaatattgacagccctgcgataatcacgctgaagcttggttctcacttgcacgtaattattgcttcggccagccaattttccattaacccttcttttcttggccaatattctctgataatgcttgatccgcttgtacagtttctgcagtcttgccggcaaaatattgattctgccctcagtatagctgaagtgcccaacgttgacatcgatggcggtctttttgccagttttaacctttattccagctttttcttcgtaggaaagagcagcgtaataatggcctctttctctaaagatgctggcaattttaacctgtttcatcctcaatgcttcatatgttggaatatcaaaccatgatttaattcctctgggcttatccagtctgagcttgccattaataactttagctcggtcagtcttaaaaccttgacgtggagctttctttgacttgaaatgcggcttgccccagtcgagctgggctttgtcaaaaaagctcttccaagcgttggccaagtccttgactgccaactgcagacaacgagcagacaaggtaaactgccaatcagccttgttattgactaattcatctcgcacccgacactcattaggactaggattattatccttatttaaagtccgtgcttcatacatatcttgccaggtttctaaggctagattccagcagtatctgcggtaatcgcatagacggtcaagttctctttgcatggtcttgtttggttttagctcagctacctgtgttttaatcatttatttcacctccaatgcaaacataagtttagcaaaggatgaaacaaaaacaagcgaacaaaatattaaatttttagcagcagctaatttgtttctatgttttatcttcctgatcaaattaactgcatctttttctatttattgctatcaaatcctatcttttagtcaatcattatttcctcctcaaaaataaaaaagagacttacatgcttgtagcacataagtctcacgaattaagataaatccagaagtatcttacttcggctgttggattcatcgcaagcaattgctgttactcccttatgacaagttaattataagcaaaattttagctatctacaagttttagcgaattgcttttactttttataaaagtcatcaaagacagtaactggcaaatgacgcttgtgtttactcttattccataatttttcaatttgatcagctgttttatctgatacttccttaccttcaaggtaatcatcaatctcttggtaagttacaccgagggcaacttcatctggcaaatctggcttttcttcttcaaggtctgcggttggagccttttcatataaatgcttaggacaacctaattccttaagcaaagccttgccttgacgcttgtccaaacggaacaatggcgtcaaatcagcggcaccatcaccaaacttagtgtaaaagccactaaagttttctgcagcatggtcggtaccaacaacggcacccttattagcaccagcgatggcatattgaactaccattctttgccgcgccttaatattgcctttgttaaagtcagtaatcttttgaccagttgcttctacaaccttcaccatagcatcaactggttccttaatattaacaattaaatcctgatctggcttttgaaaagcgactgcatctgcagcatcttgggcatctgcttgaacgccataaggcaaacgaacagcgataaattgataagaatcatcgccagtttcctcacgcatttcttcaattgccatttgacacaatttaccagtcaaagtggaatcttgaccaccagaaatacctaagacgtatgacttaagaaatggattagcctttaaataatctttcaaaaaatcaattgaacgtctaatttcttttttagggtcaatttctggtaaaacatgttcataagcgataatttctttttgtaattctctcatcgaccaatgcttctttctctaattttacgccgaatgtcttgaatcaaatccatcttggattcgtataagttttgtgataaatccactggatattcctgcggattcaggctacgcttatattcatcccataaaccatcaaggttgtcagcacagaattttttaatttcatcaagactaggttgatcataaactaattttccatctttaaaaatatcatgtaaaagtggaatagcagtgtaatcagttaccaccttattaatatagttatattgtgggtggaacatgaagagcgcgtcaaatttgcgtggatcttcattataccgagatacccagtcaccttcatttttcttagcagtgtttgcgctaatccgccatacttgttttttacctggggtggaaactttgatggcatttgaagaaatcttcaatgtatcccgcatggcgcctaattcatcttccatggcaaccaacttgtaaacagcaccaagggctggttgatcataagcagtgatatacttggtcccaatgccccagacatcaattttagcgccttgcatctttaagttagtaatggtgttttcatcaaggtcatttgaagcaaaaatcttggcatctggatagccagcatcgtctaactccttacgaacttgcttagaaatgtaagccatgtccccagagtcaattcgtacgcccaagaagttaatcttgtcgcccatttcattagccaccttgatagcattaggcacaccactacggacagtatcgtaagtgtcaaccaaaaaaacacaattcttatgtgtttccgcatatgccttaaatgcgtcatattcactgccaaatgcttcaactaaagcatgagcatgagtccctgaaataggaataccaaacaatttaccagcacgaacattactagttgaatcaaagccgccaatataagcagctcgagcaccccaaatggccgcatcggtttcttgcgcacgacgagagccaaactccattagaccatcatctttaacagctaacttgattctagcagctttagttgccaataaagtttggaagttaataatatttaaaatagcagtttcaactaactgacactgggcaagtggaccttcaacttgcaaaattggctcgttagcaaaaaccagctcgccttccttcattgaacgaatagtgagctttaattttagattgcgtaaataatcaataaagtcatcatcgtaaccttcattttctttcaaatattgcaggtcactttcggtaaactttaaattctttaaatagttaatgatgtgttccaaaccagcataaacagcataaccgttgccgaatggttccctgcggtaaaaactttcaaaaacggcattgcgatcagcaatccctttcttgaaataggtatacatcatattaatttcgtataaatcagtgtgtaaagccaacgaatcgtctttggctaattctggataaaacattgcttctctttctgtcattaaaaattaacaatttcgtttttcattatacagccattacagtccattggctattctcaaaactatttttacctcaaaattagatacactttttcaattgagtccagttgatttttaatagaaaaatgctcttccgcataccgcttttctgtattagccatctggcgtaactcttcatgggttttattaacggccagattaatctctttagcaattgaatcaatgtctcccgttttagcaatgaaaccatattcgggtcctggaatcattttatgaatatcacctacatctgtggacaaaatagggattaaattgtctgttgcctctaaaagcacaagtggaaaactctctgaatatgaagttaagacggctagatcaattcgcttatataatccgctcaattggtgttgagtcataaaaccgtgaaaagttacttgtggtgccatgtccaattgccgcgtcaaggccttcaatgcttcaagctgactaccatcacccgcgatatgcagacgaatatgctgatcatctaattttttcacagcttttaagagcaattcttgtcctttaaccttttccgtacgagcaacgttaataatattaaaataggtatgttcatatttagctggaatttcactatcactgtggaaaaagatgccattatagatgacatgtaccttgtttttatccacatgtgcgcgattaattagtagcttggcaaaacgctgagttactacgaaaatacaatcagcttttctcaacgcacgtaaattaagtttagtaaaaatattgccaatgattcccctaccttcaaagtctagataaggatctgaatgtacagtaatacaccaagttgcacgaattcgcttgtgaatcaaagataaaaataagttggcacgcgcaccatgagtatgcacaatatcatagtgcccctcattgataaacttagtcagtctacctaaactgcctaagtcataacgactattagctcctagcacatgtgtagtaatcccagccgctcttgctgcttgtgctactggtccttctgccagcgttaataattcaaaatctttgccttcatttttggcttcagttagcaaattaacaatatgtgataaaccgccgccattttctaaaccagcatttacatgcaaaaccttcatcttagtaaaattattttcccttcttttttgactgtttaactcgcacaacaaactgtggcaaaactaacatccgcttaaatctgctaggattagtaatcaagcgataaaaccactctaaatgcgtcttttgaaaagcttctggtgctcttttaacgatacctgaaaagacatcaaaactgccacccacacccatcatcaaagctggtgtttcgttcttacgtaagattgataatagtttttcttgcttaggaaaacctaatgctgcaaaaaccatatcgggttgtgccttctgaatgcgccgtgccactagttccaaatcttcagtaaagtagccgtcttctgcaccaactagattaatatttgagtattccttagcaattttgctttgtactgcatgaattacttgtggcttagctccaattaagtaaactcggctaccacgatcgctagcaacatccatcagccaagtaaacaaatcatatccagtcacccgctcaggtaacggctgcttaagcattttagctgcttttacaatgccaatcccgtcagcagtaatataatcgggatcattttttagaattttcataaattcaggattctcgtttgccgccatcacaatctccggattagcggtcacaataaaggtcgacaggtgattatttagtcgattaataaattcattttggaattggttaaaagttttattatcaaaatcaacacctaaaatattaactttgctcattttcacacctcatgcgttttcttatctagtttctattctaccattccgacacgcaagtacgagaaacatgttcaagttttatattttattcaaacatgataagattgttttaataaaggagaaaaaatgaaaagagttattacctatggcacctttgacctacttcactacggtcacgtgcgactgcttaaaagagctaaagaattgggcgactatttaatagtaggtttatctaccgatgaatttaatgaattcaaaaaacacaaggaagcctacaatacctaccctgaacgtaaatacattttggaagctatccgttatgtcgaccaagtcatccccgaaaaggattgggatcaaaaaatcaccgatgtacaaaaataccatatcgacacttttgtcatgggcgatgattggaaaggaaaattcgacttccttaagccttattgtgatgtggtttacctgccaagaacgccaggaatttccactactaaaattaaagaagatcttaaataaaaaaatactccaattccattcaatttgaatgagattggagtttttgtttacttagaaaaagtgaattcaaatcgttctgcaacgtaacgtgcgcgggtgtattcgaatggttgcccatctgctagttcagttacctgtcgtctagtaattaacggttcaccttttttagctttaagaagacgcgcatcttgctcgttggcaattgatgcagaaatatgttccgtcactcgtccaatggcaaaaccaccgcgcttttctaaggttttatataagtgcgttgaaacatcttctttagaaaaattctttactaagtagtatggcaccgttacgacttcataacaaattggtgtcttatcagcgtagcgaatccgctccatccgcaaaacgttctcattatcttttagcgcaagacgctctttttcagataaagatggattgccaatctgataagaaattaacttacttgaaggaacttgaccattagccttagtaatctcagtaaaggacataattcctgacattttttcttgaaccttttgactagctacataggttccgctacccaagcgccgttctaaaattccttcatcttctaatgttttaatcgcttggcgtaaagtcattctcgaaacgccaaacttaactgccaattgacgttctgctggaatacgatcccctacttgataaacgtgattctcaatatcacgcttaatctgattgtgaatcttgatatacatcggttcttccatagtcgccacccccaaagtttagtactgctattattataatctaaattggtctagcttgcattaataacactgcttcaattttacagactattttttcttagcggtccacttcactccaagaatataaacatttggacgcttgttatattccacttcaacttgttcattatcattagcaactacactggcactaaattttgcttcatctttaacagctaagttagcctgattaggattcagcacaatattgtggcccttcatattagcttcaccgctcaaagctaaaaagtactcatagttcatatttccagtgaaggtaacacgtgtagcatcacatttcgcctgatcttgaaaatctgcatgagctaaaattacggcattgttcattgtaacttttgcttcatcaactactatcattcgattgatggttgaattttgaatgattgtccgtgtctttttatcaatataaaccccacccaaaaaagtagaattcataatattgctccagcagtcatcacttaaataaaagcaggaatcgctagcagacttaacttttgaattaagcatattcatccaagtttgcccatgcagtaatacataatctacttccgaattattaagatccaactccgcattcgttttggcaaaagtattaatactgccgtgaatctttgaattatttacaattgctgttccttcgccttcaattgccaaagcacaatatttgtccgagaaataatcaatttctgaatcattcatttccaaacggaaattggcatggtcatacatggaaactgaaccgttaacaattttggttgaataaagttccaacgtgatcttaccattaaccgcgatagctgctgtatcagttcccgtgcccttaataaagcaattacgcaaagttaaatagccatcaacgcctactggtacagataggctattatgttcggtagttgtatcaatgcataaattttctaaagttacataacgactatcttctgaaacactaatatagccataaatagtcgtgtcttctggcaaagagcctgttcccttaattgtgatatctgttagtgtgatgccctgcggcaaataataatatccggggcccagcatcaacacatcatcggcacgcaaatcctttaaaacctcgtgccaactgactgaactgctagatccccctactctaattatcctagccatccattatcctttcatctcgtaaaaaccgattactattgtactaattttctttaatttatgttgtatttttgctcatcaaaaaagctaggttcgattcctagcttcttatactatttcattttaacattccagtaataagccacattaccataaggagaaagttggaaacctttcactctcttattcaataagtatgacgtaccttgttggaatagtggtgccgcaaaggcatccttttgaattaattgtttttcagcgttaactaaggcattcaatctcttctgcggatcagtggcataagttgaacgagccaagtcaatttgcttccagaaattggcgttgtgataatctggcgctaaattaaacaaaccaccaactgtcaagaaatcaattggatcttcataacttggctaccaagttccgtaaacaaagtcgtaattgtgattagttgtgttagatagccgtgacttcaaaggaattgaccgtacccgtagagttagaccaggtaaatttttcatcaaattgctttgaataaattcacccacacgcttagcatcgtcaatatctgaagtaagcaattctaaggttagcttcttcttacccaattgcttcaaaccaagttgccattcctttttagcttccttggcattataggtaaccaagtcgccagcatccttgcggtaatcgttgccagttgcctgatcggtaataaagtttgcggcaacaattccatttgacaccttgccttgatgcaaaactgtcttgactaactgttgcttattaattgcccggctaatggcccgacgaatatgaacattgcctgtactcttacgcttcaagttgaaagaaagataaccattagttggcgtaactttggtatgatagctagaattattttgatactgcttaacaaaatcagaagtcaatgtcgtgtaatcaagttcaccacttctgaacaagttaaccccagttgaaggagtttgaaccacttgtacgttaactttattcaaatcaacaattttcttgttccagtaagttggatttttcttgtaagtccacttcaaatttgaacctgtccaaccagatacggtaaatggaccattgtaaactagattcttactgctagtcccatacttagagcctaactttttaaccaatttagaattctgaggatagaattgtgcaccctctaagatttgtggcaaatatggaattggattagctaatgtaacttgcaccttatacttgccgagtgctttgattcccaatgaatttaccggtgctttaccttgagaaattgcctcaccgtttttgataatggcataagaatcggcatctaaagatgaattttttgggtcaacggttctgcgccaagccgttacataatccagggcagtaactggatcaccgttagaccacttagcattattgcgtaaggtaaaagtatagaccttctggtctttagaacgttcaacttttgtcgcaccagctaattctggctgatttttcttattaaaacggtaaagaccttccatggaattctgcaaaacttctgaactagtcgtatctccatacttgctcgaatctaaagttgaaatttcatttgtgacagaggtattcattgtcttagtcggtgcagcattactgtcattgttagagcaagctgccagcaccaatgcggcagctgctgtcatcactcctgaaaaaatccattttttacgtctcaatcttctcacactttacttactttttgtttaatacttacattttacaagtatatctaatacggaagaaatttcaaatactttttccgtataatagctataatcaatacgtatacaaaaatggcaaaaaaaaagaaacgtcacataggacgtttcttttttcgggttgggtgttcttttagaactattgggttagctggattcgaaccagcgcatgatggtaccaaaaaccattgccttaccacttggctataacccaataccagctgaactttttacttgtcgttcaacaatggaggagggtggattcgaaccgccgaactcagagagagcggttttacagaccgccgcgtttagccacttcgctactcctccgttagctgacttaattataataacgaaaatccaaatcaaatgcaagacttttttgaaacttttttcaaaaaaaagaagaagccatgacgacctcttctcaaaatttaaaaattgatttatatctaaacagttaattttaagcctaatgccttttgtgctacttgatttaccagactccattgcttgtcataagttggtgaaaagaagaaatctgcttctgctaaatcttccagtgtcaacttatttctaatagctaagctcaaaacattggcttggccactaatgtcatatgatgaaagtacgctaccgcctaagatttggtggctgtcttcattataaacaacagcaatatagcaagtaggattatctttttcaggaatatagtctggacgaagataactctttaagactgtttcttttgcattaattcctgctcgcttggcattcttttcactgagtcctgttgttactgcatgtaaatcaaaggcttcaagcaattgtgcaccaactaagcccttaaagacacgttctggcttgtcttcaaataagtgctcaacaacatattgagcctcatgccgtgcagcaatggcagatggcatcggtactcttctgttagctggaatgctaaatgggaagattgcatccccaattgcatagacatcctttacattggttctaaagtaattgtctaccttaatgtagccattgtcataaagatcgatcgtgtttttcaaccaatcagtatttggcttaataccaactgtaataatgacacaatcagcagtaatatcacccttatcagtctgaactgcattgacctttccattgccaacaaagccagtaactttagtgttcatagccaggttaacaccatgatcagtcaattctttttcaaataagctagtataagtatcattcaaataattttctagtggtttttgcccaccgtcaattaaagtaacattcttgcctgctttagcgaaaacctcggcagctgcaattccgttaccagcaccaataactgcaacatttttaatagcttcatcttgagcagctgcattgatctctgtagcgcaatcatagcctctcatcaacataatatttttcaggtctgctccaggaagaggcaaacttgcggggttaacacctgaagaaataattagcttatcataactaacttctttggttgtaccatcttttacgtttttgacagtaaccgtctttttagctggatcaagagctgttactgctgtgttattaacaactttaccaccccgttcagctagatcttcaggagtaaagtttctaacgttgtcttggcctgtagtttttccttcaaggaatagcttcattccgcaagacataaaggaaacgaagtcgcctgcttcataaatcgtaacgtctacatcatcataacgatctaaaatttcataagctgcctcttggccgccgtgggatgcacctacaataatgattttcttttttgacatagcctgacctcctaataatgcagcaataattgtcgtttttaagtaatagcagttattgtaactggttacattatttatcttttaataagatatttcaattaatttgcttttgattagtgcgaagcagcaatatattttttatataaaaaagagcactactgatagtagtactctagagggaaattttccaaaattatcttatttagctaattctgctgatagatttcgttcactaatttagtgatttcattacgattaagaacttcatcatacatatccattgtttcctggattgtattttctaaattagtaccatgatttttggcatagccaataaacttttttgcatctactattttagcttctttaatcgctttttctgcagctcttttagcaacttcattcatctcatattctagcttattcatgtcttcgacccattttccgctattcacgtagtagtcgatatccttctgcaggctgatatccctgcgtagtacatcatccgtttttctagatcatttttacgtgttgtttgcatctcaatatcatacactcgactttgatcatcttgtgcccagatatctaagcgaatgttttgggattctagtccaatgttgccgtcatactgggtaatgacattaacttttgtcaattttaattcaggaaacatccgacgtagcagttccagacaattctttttattgctcataacatgaccgaataccaagtcgttagtaattcgaggatatcgattaattcttctcctcatattttacctcttttctttttcttaagtaggaaaattaccctccactatttattacgcaaaaaagtgcaaatttttttcagaaatttaaaaatttagacacgaaaaaagccgatgcaaatgcatcgactctttcagttaaattattctactttttaatagaagtttacagccttgatgtaacgcttgttgttgtttctgcagccttcaattctgtagtacttcttaccgttcttaaatctcatttgaccaccgtaagtagttacagtttgacctctgtacatcttaccagtacctggagtacgacggtatgatgaccaataaatgtaggcattgtgcttaaaagtacgttggttaccagtaatgttggttacacgaacgtattcgtccttgttagccaccttgtagtaagtcttaccgttgatagttacaacagttggaacgatttcaatgtcgttgtaagcgtagtacatgtgacctaagtagttaccgttcttgtcataagctcttgaatcaaccattactggcaaagtcttggtgttagtgtcaccagctggcttaacaagtgatgaagtcttaacccaaatgttgcttgagttagcatctgacttagacttagttgaaacttgtgagtatgatacattgttaagggttctagtttgatcagcaacgtaaacagtgtcaccatctttgaaagtagttgaagctggtcttacattaatgccataaatgtggtaagttgcgattgagcttgcgccattagcatatagagcttgtttgtggcttgaagtaattaaaacagtgtatgttgcagtagtcttcttaccagttaaaccagtagcagttaaagttacattatagtaacgtcctgcttctgaagtattaacaggatttgaagttgcttctagtgaagcagctgtattattattgctgttttgtacagctgaaataataactggctcaccattactatttacaaaattagttggattaaattgtgaaccaacagctacttggaatatttgaccattaacactccccttgctttgaccattcaatgaccaattgatcactggattttgagtagtatctgtagttgaacttgaacctgaaactacaactgggatttgaacagtagctgtttgcgtagaagtagaacctgtaccagttaaagtaagattgaaatcactagttggtaccgcagtaatattcttgttatctttatcaagagttacacctgcattcttaagaatagcagcaacttcactatctttaaggttaactttttctccactggcattattcgtactaaagaaaactaatcctaaatcattaattgccttagtaacactagctacagtatctttagccttaatagaaatagtagttggtacaacattagctgttttatcggtagtacttgcagcatcaattacttgattgccatatgtaaagtatgatctatctgttggctttgctgttgttgctgtagtagtacttgtagtaccagtagtgttagttactgtacctaaactaatagcagcgttaactggaacagctgaagctgctacaggagcaactgccaacaaagcggcagcagccatacttacaattcttgtattctttctcataattatgtggcctttcctttctgaaacagaaattcatcctaagcagtaagttatatcttcttctgcttgtgaaataattatagcatgttacgaacccgattactaaaaacaggatcgactcgtgtgtgtgattttaagaatacctcctaaaatcaccagtaataccctaccctttatttgttaaactgtagttaccggacttttacaattaagattcaaaacattacatttttgtgaagttttaaacaagttattgatttatgacagaacttatgtgtgttaagaaaaggtaattttaacacttgttcgcttaaaaaaattaaagctcttagattttttgattagaaataattgcttcatgttctttaatatgctcaactcgccctgcatcccccgcaataagtaacaaatataatgcctcaatcattgtcatacttgccacgcgtgagaaataatactgcgattgcatcaccgtctgccgcactgctgtctttaaatgcacatcagctaatagcgcaatcggtgaatcatcgcgattggtgatcgcaatcaccggcatccctttttgtttggctaccttaatttgcttaatgattcccgctgcttcacctgaattcgaaatcaccaacaagcaatcctttttactcaggttcattgtctgcgcaattgccgtttcaatcgtgccacctgaatcaattgccaacaagccaatctgattaaacttatacactgcatcagcggccaccggataagtatcgccctccgcactaacctgcacaattctgctttcagtcaaaaaatgcagcacctgatctaatttggcttcagtcacattctccaaagtcgccttaatctcggcgactttatttttttcaatcaattccaaattagcactagcatcatcacgtgacatattttgaagtgacacactttcagttgcattctgagctagttgaatttttaaatcatgaaaacctgtcaaatctaaattatgacaaaaacgcgtcaccgaagcatcactcacctcagcttcagttgctaattttgaaattgtataatttaccacctgttcgggctgttttaagatcacttgagcaatcttctgatcactggctgacattgtcgctaatttactatagattgtatcgataattttagtcattattctcaccttttctgtgccaaaattatatcatcaatgtaattaattttcacaattttatttttaaagaaaataaatttatattttgattgacgaaaatcatttaccaaggtagtatgtatttgtaaataattttcacaggagaaaataaaatgaaaattaattcgataagtgacctcgctttaagtaaaatcaagccgaaaatgactatttctcttggcggcggaagcaatgtatttaagttatctcaagcgattgcacagcataacttagacatcacattatattctccatccgaacttactcgctttaggtgcaaagaactcggattagagcttcttccatctactgcagcgactaagatcgatattgcttttgatggttgtgacagcattgataagaattttaacgttctaaaaagtttgggtggaattcatctttttgaaaaacaggcagcacaaattgccaaacagtttatcctactcttacccagtcaaaggatacaaccgattctgaatcctaaaattccactttgtcttgaagtggcaccgccttgtgttaatcaagtacagaagtatttaagcagtttacatttaactagtaagattcgacaagatagttcagtagctgcatttgcccgtacgcctttgggcaactacttaatcgatgtttttaacgaagattggcacaatatcactgaacttaatcgtcaactttgtttacaaaatggcgtagttagttcttcactatttgaaaacttaactacttcattaattactgaaaaagacggagaaattattgaacttaagagaggtaataatcatgaaaacatttaattggggaattattggtactggctggattgcacatgatatggctgatgctttgaacaaagtcaacggcgaaatttatgttgccgcaaatccaaatgaagaagcactccgtgcctttgtccaagaaaaacatgtacagcatgctttcactaatcctgatgaaatgattaaggatcctagcattgatatcatctatattgctaccccacacactttccactacgactacatcaaaaaggccctcaatgctggcaagcacgtcttttgcgaaaaggcaattaccgtcaatgcacagcaatttgatgaagtggctcaattagctaaagagaaacacctaatcttaatggaaggttttactctttatcacatgccaatctaccaaaagatgcaagatatgattaagaccggaaaatttggcgaaattaaaatgatccaaattaattttggctcactcaaggactatgatccgcagaatcgcttctttaataaggagctcgctggtggtgcattgctggatatcggcggctacgcaactgcttttgccattagtttcatggatgaatatcctgaaagtatcaataccacggtaaaattctttgaaactggtgttgacgaagaaagcggcattattttaaaaaattcgaaaggccaaatggcagtgatgtcattatcgatgcgggccaagcagcctaagcgcggactggtttcgggcaccaaaggttatttcgaaatcaatcaatatcctcgcggcactgaagctgatattacttacacccagagtgctcatgaggaaagctatgataaggttactgccggggatgctgatcaggcgcttgaatatgaagtcactgattttcaaaagtatattgaacaaggccatgacgaaggcgaattggaaaaatcgcggatgatcgctcacattttaaccagcattagaactgcctggggcatgacttatccatttgataacgaggaataattagttggatttcaaaagggatcgatacataacatcggtcccttttatttgcacttattgcttattttctgcgacatatttttctagtcgtttcaagccttctttgatctgatccatcgacgttgcgtaagacaaacgaatatatcctgctccacctttagcaaaaaatgagcccgcaattacagcaacatgcctcttttcagccaaatcataaataaacttggtatcatcttgttccaagcctgctggaattttggcaaaaatgtagaaggcacctttaggcttaacgcattcaaagcctaacttggttaatccttcataaagcacatcacgccgcttttggaattctttcttcattggttccgcatcgttcattccattgcctagtgcttcttcagctgcatcctgcattggcgttggttccgtcgttgtgattgcttggtgaatcttagccagttgatccaaaatcggcttaggcgcagctaccacaccgattctatagccagtcattgcccaagcttttgacacgccattcattaaaacaacttgatcatgtaaagtcttttccatcgaagcatgtggctgatcataattgagctcactataaatttcatcacaaagaacaaaaaccggcttatctcgaacaacatctgctaaggcatcaagttcatcttgtgaatacatcacacctgttggattggtaggataattcatgacaagcgccttaacgcgatcaccatacttgtccaatgctgcttgcaatttatccggcgttaatttgaagtcatcgtcagaagtgtcgatttgttcaaccgttgcacccatggatagggcatccccaatataaagcggaaaaattggtgttggcaccaaaacaacgtcgcctggattaagcgccgcagtcaaaaagtcgtagatcgactccgttaccccattggtgatcaaaatttcgcttgggtcgtatttttgtccatatttttcagctaaaaaatcggctgccgccttgcgcaaacctggagtcccgttagatggcgcatagtgtgaatggttattagcaatgctggcttcagccgcttttttaatatgctctggcgtgttaaagtcaggctcaccaatcgtgaatttgacgatgtccgaaatcttgttggtgtaagctgcaaaggccaaaatctgccctggcttttgttcaaccaagccttttttcatatgttttgttaagtcgaccatagtttttcctccttatatcgaactaaatcaattcaaatataggagtctttttaatctttgtcaaaggaaatattaattttgatatctaaagtgcacattaaatccaataattaacaaagcataaatactataaatagccgtaacagtcggatacattgcctgatactttatcagcaaaagaataattaaaactatcgccaaaacaatcgttaatattctaaaacgttgaaaatatgacaaaatcggtaaagccactgtcaaaactatatcagttattaagatagtaaaatccaccggatatgatttgatataaaaaaactgaaatattggcaatgcttctaacagtaagaagatataactaataatcccacatattaaaagcaactgattaagtatctttttatagtctttcattaaatcaagaacttctcttttttcatgtaccagtgcttaaccagagtggtcaatgcaatgtacaaggtcaaaagtacaagaactacgagaacataatattctgggatcggaccgaatttcattaccttagccaagcttggaatgtaaggcattgcagtaccgatcaatcctgcaccgatcgtagcgagcattactacgcctgaagagtgctgttgtaagaagggaattgctggatcacgcaatgcttggataaccatttcctgtgtccagagtgattcgatgaaccagccactccagaagatggccataaagacagccttttgccctggagtagcagccacataacttgtgcccacagtacttggacaaatccagaagtaaagcaaggcaaacgtaatgatatcaaagattgaagatgtcggaccaaagaagaacatgaacttaggcaacttctttgtctcccacttacgtggtacttccaagtatttttcaccaactctatcaaatggaagtgacaaacaagatgtcccgtagatcaagtctagaatcaacaattgcattggcagcattggcaagaatggcaagaatgatgatgccactaagattgacaaaatattaccaaagttagatgacaaggtaatcttgatatatttcatcgtgtttgcaaagatctgacgcccaattcttacaccatgttccaaagtacgtaaactcttgtgcagcaagataatgtccgcactcttttttgcaatatcaacagccgtatcaactgagattgctacatcggccttcttcatggctggcgtatcgttgataccgtctcccatgtaagcaaccgtgtgaccattttccttcaaaatctgaataattctagcctttgactctggtgaaagctttacaaagaggctacattcttcaaccatctttttaacttcatcgtcgctcttaccagcaaaatctttttcactataaatgtacttggtgttcaagcctactcttgaagcaacactcttagttacagcagcgttatcaccagtcaaaatcttaacggtaatatcgtcttgctttaacttcttaagcacgtccttaacatcatccttaggtggatcaaggaaggccaagaagccagttaagatcaaatctttttcatcgctaacattgaattcaccggcttgagcaggattgttcttgtaagctaacaaaacaactctcaaaccatctttgttcaaatcttcaatgtgctttaaaactttttctttgtaatcatcagttaaatcgttgatgtgactgccaacttgcacacgattgcagcaagcaagcatttcttcggcagcacccttagttaccaggatacgaccatcgccgtggcgcttgaccacgacactcatgcgacggcgcttgaagtcgaatggaatttcatcaaccttagtgtagtcgtgtttaatttcattaacatctagctcatcgctagcggcatcgatgatggcttggtccatcaaatcgtgcatccccgtttggaagtacgagttcaagtaagccaagcgcaaaacctgtggattttccttcatatccaagttgtagtgccgttccaatacaaccttgttttgggtcaaagtaccggttttatcagtacaaagcacgtcggcggcaccgaagttttggatggagttcatctttttaacgatggtgccgtgcttcgacatttctagcgaacccttaaccaaattactagtaacaataactggcaacatttctggagttaaaccaacggcagtagcgatggcaaacaacaaggcgttgagccagttacctttagttaaaccgttgatgaccaaaactaaaggtgcaatgatcgcggtcattgttaacaataatttagaaatgttcttgataccaacatcgaaattagtttccttaacgtcgttgtttgaaatatccttagccaaacgaccaaagacagtttgttcaccggtggctaaaacaacgccaacacctgaacctgacacaatagttgttccttgatagattacatcaggatagtccaaatattgatccatgtctttttgatcgggcctcttagtcgcaatcttttccacaggcgttgattcaccgttcaaagaacttgatgaacagaacaagtctttagttttgagcaatctaatatctgctggcaccatgtccccagcgtggatattaataatatcgccgacaactacttgcttggtagaaatttcttcatccttttgattgcgacgaatattggtagttacagacaccatatttaagagggcttcaactgcgtcattagttttcacattctggataaaggatgttaatccagaaataatgatcatcgcaatcataatgatcacagtactcaggtccttttgatctgccggcacgaagacgtagtcggtaaacagcgacaccgtcgctagcagcaacaggaccattgtaaaaggagtgaagaatgattcaatgaagaaatgcaatttcgtgttgtgcttcttggtagcaacttcgttaagaccattcttctccaaacgctctttagcttccgccgaagacagaccgtctagcgaactatgtagcgtctttaacgcttcttcgggagtttgcctagcgatctgcttaacaaactctgtatcggctgtcttcttattaatcagcaacttgttttttgccatgttaatcacactttctgattaaacacgcaaacaaactaaaaaggagccaataccaattagtattaactccttatctaagcgatgtttcctcgtcgttcagttttgacactacgtgacgtaagcacaggctagctatctggatctcgccttatcttgacaagaactattttactcgttggcatctctggatgtttccgggcgatagcttgtgttcacgtaggagcctcacctaacagtttatttgctttttcaattttcatttttattatatgcatattatttgacaatgcaattatctttactaaatcgttagaaattgtaaaagaatttaagaatgataaaaaacacgtgtttgcaatgaacacgtgtttttttataatttaattttgatatactattctatagacatggatatgttgcaactatttgtgtttagtagttttagcataactaaccacccctcacacattttgaaattacggcggtgagagttatgcataaacggatagtttggaggtttagtgctccgtggtagcttgggctattgcaatcagcatcgttctaggtgctttaggcaatttagctatcaatttggctatagcctatgcgataacaaaaaaagctaatcgcaaggattagctaaaccaacagttatctgaaactacgatcgaagtcaacggattgcggccgtgggcttcttttcatatacagattataacatgaattatccgaaacgaataaaaaagatcaggctcactgcctgaccttgctattgggttagctggattcgaaccagcgcatgatggtaccaaaaaccattgccttaccacttggctataacccaatcttcaaaccttttacttgattggttctatttgaatgacctctcgatcacccaacagatattagtataggggaatgaagaaaaaatatcaaggaaaaattcaaaaaaattttgattttttcacatttgctcgaaggatactgaatctttcttttatgaattataaaattaatttgtttttttacgattataacttttgtgacttcttaaccttattcattaattcaaagtcgttggtaaaaattccagctacaccaagtttaaagtacctttttgctatgcttactttatctactgtccaaattctttgcgtaactttgctaggtaaataccaatgcggatggatcgctgcaaaatgattcttagccgcaaactgttcaggaaacggcaccggccatttgtttaaaaagcaatattgttggtggggatcaattcgctggcaattttttaaggtttgataattgaaggaagagaaaataatgggatgcacaaaatgatattcttgtgctaacgccaaaacgatggcttcaatcccctcatcatgaatcttgttagtcttaaattccaagttaacatacaaatcctgtccctgaagaatttcaaataattcacttaacatcggtaccggttcaccgttagctaaacgaaatcgcctgatttcacttaaggtatagtccttaatataacctgtcccattagtagttctatctaacgtttcatcatgcattactaccggcactttatctttagttaagtgcacatcaaattcgacaccttcagcgccatgcgttgctgcatatttaaatccttgcaaagaattttccgcaaatttgaccggtaagccccggtgagcaaaaataattgtctgagtcattttttcacctacaaaaaaatgccgctctcgcggcatctgctctattttaatctaagacgattgcaccttgagttgccaaagtatcacgaactagattcttaacatctcttctaactaccataccatcggtgttctcaacgtattcaagatattgagctgacttaatatgtgcatcataagccttgtcatcaaagtaaacttcgacaaaataccattcgttttcgttcttcttattgactccagacatcataatttccatgcctggttcagcagccatgctagtcgtcatttctttcttaacttcatgcgcaaacttttctgcatcttctggtttaacttcaactttaactaagcgcattacaaaatgatctgcgttatcattcaaagcatcatgagcctttgtggtaataacttcgggctttaattcgattacttctttgtctgtggaaatcttgtcgatggtttctgcaaaatcatcagcatgtgctgctgcaatgtgcaaatcttctgccaagctattccggaacaattcgatttcgtaattgtcttcaccatgagcatcgtcatgtgcgcttccaattaacaaagttccttcttcagctggaattgagttgtgcatgttattttcaacttcacggatatattcaccgcgatcgttttccttgatatttaatttagtaattctaaaaattggtgtttcatccatttttcttgcctcgtactataatctttccacacctatcattataaactaatgcagaaaaataaaagcccctattcaccagttatttgatcaattttaaccgctttagctggccattcagtccgtacatattccaatgtactgccttcattgctagttaactgcacaaaagaacaattgggcagacctaaaaattcacgatggttagttttttcattaatgtattgcgacaaactatcgccatgaccaacaactaaaatattatcgccatcttgtgcatcccgcatgatcaagttaatcccgcgctccattcgctcaactacctcatgattatcttccacgcgaaatttgcccaaacgatgcagcggccaaagtagcacattgcgtgcctcaaaagcgccatagcttttctcttttaattcctttaatcgaacatactccatctcaggcccagcaataatctctaaagtatcacttgccctttcttggggtgagcaatatgctctagcaaaattaattccctgatcttgaaaataatcccgcacggcttccgcctgcttaatgcctaatggtgttagcgctgaatcacagcttccctgcatgcggtgtcctttattaaaccaagtttgaccatgtctgactaaatataaattaattgccatttcgtcttactttaaaccctctgctggccacacgtatgaatcaaaatggatctttttaccatcaactgttagcttcacgattgaagcattgccaaaaccgccaaagttcttattctcggtagcatcgcgcacaaacttagctaaaatatcaccatgtcctacaactaaagcagtttgaccatcctctaagccgcttaaaatctcgactaccgcacggtgcattctagcaacaacgtcttcgtctttttccatagttgggtctacgttaggattattataattccaaggcaataagaactcatcacgaccttcaaaaatgccataacatttttctcgcaggtcttttaaacgcgtataaggcatttgatgatcagtaataatttccaaagtatcgcaagcacgctcttgggttgatgaaaaagctttgtcaaaatgaataccctgctttttaaaataatcacgggccatttcaacctggcggatgcctctttcattcaatggtgaatcacaacgtccctgaactttatggtaatagttaaaataagtttgtccatggcggactaaatataaagtttttgtcatattttcctcgctaaatcgttttttcctttatcttatcaaaaaagcacgcgtcgtgcgtgctttcatattttttcgttaaattttgaagttcttgttgtattcactcgaatttacaacaaaacttggcacactaatgaagtgcattgagtaaatattgccagtcttggaaatgctaaagccataataattgtagtccccatcatgacgtgagccctgtgtattaaataaatcaccggcatgttcccattcgcggtaaaggctcttatcattacgctgattttccccagctcctgcaaagccaaagatcatttgcttcaagccaaagtaaatatttcgcttcatttcagccatagacataatcttcttattagtagaaaaaccagccatatcttcgacataattatcgtttaattctaagccatgtttcttgcaagcccgtacaattccggcaacatagtgatcgccatctttgatactcttgccattttgctcgtattcttgcgcaattgaattagctaaggactctactccagaactataaacccacggcttcaaacctaattgactacgagcactattaattaggcacaaagagaattctgccagttctttttgctcactagcagaaagatcggcaagattgatcattttttgatcggctttgctttcacctgagctaacacgtgaaaagtcgttttgctccattcctttcatgcaagcctgaataaaactagcacttggcttccccttatatgcttgcaataaactagctttcgtatagccactcggcatcttcattgtagctgttacataattctgcgttgcagcagtctttttaacgagtttggcatttttagctaataaccattgagagttatttccaatcttataagccaaatattttttcttgcccagctttaaatactttttagcagaataagaatactctcttttagctacagcataatacttagacttcttgcccttatttgtataaagtctaactttcttagttcctttaacctgaacttttcccttaactgctgcttgaaccgtttgtggtgtcgtttcgtgtattacactagccgtccccatcaggcaaacactagtcaacaaagtcacaattaatttttgcttcatagctgttccactttctgtatgttttgattattaatatttgttatttaaattatatcgtatttatttaattaaaaaaatcaaaaagagacacactatcattttgacagcatgcctcctttaagttagtttgattttatttagttttgaaaagaggtttatttttagtaccagccgtttgcttgccagaatgccttagcagcagtccatgagccataacgacctttgacatagttatcagctactcgctcttggttagctgctgaatagtcaccattcaagtatgaagctgaaagttggtatttaccaacgtattgaccatttgaagcaccgtatgagccaccagattctctaccggcaatccattccttagcactagcttctgaaccacttacagttgaagtagtagtttgagtgttggtgttatttgctgcagtagtagttgctgcagaattagtattttcagtttgagtttggtgttgtactggagcttgggttacagcagcttgagtgtggtagccgcgagttacatacttagcacgaacccattggttcttgcctaagtcataccacttgtgacctttggcatcgtaagcagtcttaattactttccatgaggtgttgcttgccaaagtttggccagtagcctctggattcttgtagctgttgtaaacagtgattgcgttgtctgaaacgttcttaactgttacaacagctgtatcgttttctacaatagcagcttgagcagtattagtgttgttattagctgctactaaacctgtaactgataaagcagttactgcaattgacttaactaagatagatttaattttcaaaaaaattctctccttaaaattttaaaagtcataagtaacgaattttcaccttattcgtccgtcccattcaattgacacagcatatactaccttgcttaaattgcagaactataacaggaatatcacctgcagattaagaaactattgcaaagtatgtcaaaattgtaacaattgtaatatttatgtaaatttattcagatgatacaaaaccgcatcagatcgccatttaactcgatttttaatttttatttgctatgtgcaaaagcttgttcgcatttaatatattgaaacacttttgcaaaacgaaaaaagaaagagtttcctctttcttttttaattctcacaaattttttattaatttattccattattctgccttatcctcttctataagttgacgtttattaagtgccgcaataaatggcaggtaaatcaaaatgtctaagataatattgattacttgcaaaattgagcccgcaatactgcctgttgccaaaaaaactgaaataattggcggcattgtccaaggaattacagtcccattacataatagaactaagcctaggttcattgcacaataagtggtaatcgcatttaacattggcgcaatcataaatggaataattaacaacaagttcattacaactggcagaccaaacatagttggttcattaatattgaacaagccaggtacgatggtcagtggtgctaaaactttattttgtttacttgcgcgcttgcgccatactaaatatccaatgcaaagcactaacccaatagtggcacctccatcacccatgtaaacaaagttatcgataaatggttgcgtaacgatatgaccaccatgagctaaatctaagttacctgcttgattcaatacacggttagcatcggtttgcatcaaccagattggttgcatagcagtattaactacgttaccaacatgaataccaacgaactagaacaagctcaataaaataattgaaactaatgtaccaattaaggtatcgcctaatgcacctagtggcttagccaaaatattcatgattacatcgtgaatattgccccatccaatccaagcaaaaagccagtaaacacagccagcaatagcaattacagcggcacctggaattaaagctgaaaagctcttagctacagcaggtggcacagtagctggcattttaatttggatattatgattaataaaccattggaaaatccatgcacttaggagaccaaagataatagctacaaataatcctctactacctaagtaagtgtaagggaagccttcaactggaactttatctccactcataatacttggcgtcaaaatgaagaatacagctgcagaaacaattccggcagaaacaccatctgtcttatattgattagcataactccaagcaattccaaaagctgcaattaagaccatgatcccaaaggagccattagtaatcttggctaaaatctgtgccaggcttataccatgaacagcagtttttgatagccaatcagaccaaccggcaactggaaatgaattaatgatcctacaataattaacggtatagccatggcgataccgtcacgaacagcaattaaaggtttaaaactgcctattttagcggctacaggcataatgtgtttgttaacaaacgcattcaaacctccgctcgatttactattagccataataattccctcttcaatctaaaaatgatctcgtgtttctttggtatatacctttcgcaatataacaatatcctgaaagcgattttattaccactattttaaaagataattttttgcttatatttttaaccaaagtttgattaacaaaatattgcagttatggctgtaagtgctatagtttacatgtaatcataaaaaaagcgaggaaataaaattatggctaaatacgaagtaaagttaagcgaagaagatttacaaatgatcaaagattgtcattcaaagaacccttcaatcatgaaggctatgaacgaagccaagaaagtcgaagattaagcaaattttgatctctaaatcgaaaaaaggcgtccgcaagggatgccttttttattggttttcaaatcttgtaccgtggggatgcttccagttataaacacggactattttacccatgccatctagcactacaacatttccatcattatgtggataaatcaatggatcagaatgtgaaccaccgtcagtaaaaattcttgctggctcacctgggtattgcactgttctaactatacaatcatcaattgatagccgcctcatttgtcgaccatcatcatattttccttctaaagcagctgttggcgtatgaccagtcacaattgttttgcccgttttgttatgagccatcattttcaataaggaatcggaataccaatacttatctcgtgcccaaatacggtaaaaatcatagtcaaatttcaagccatactctatctcagagtaagtttccggatcattatactgttcatctggccgcacacccgcatgaacaaaaatcaagtgtggcgtttcatacataataggacagccttttagaaagcgataatactcactatcacgcaactcatcaggcaaaactgtactgccaaacagactaactaggctcttgccaccaccgttataaacccaaatgccatcttgatgttcctgcttctccgcaaaattgagtaacatttgctcatgattacccagtagtacgattgctccttcgcttttttgctcaattaaataatccaatacttccttcacatgctcgcggccatcaacatagtcaccgcccgcaactaattgtgcttctggaaaatctgctgttgcctgcttgattaagtctaaggtttctaagttgccatgaatatcagaaatgaagatatagttctccttcactcgatcatccaacagcgttcgattgataatttttttcatttcatactaccccatgtgctaaattaaactaacatttttttcttaattatagcagatgtacactggttctttttctatgcaatcctaaaattaacctccggcaaaaaaaaggctacaatagatatgaaaagaagtgattgcaatgtttaatgaagaaaatgcaattgatgccaaggacttacacgttgattctttcaaatatcaatcaactgaagacatgccatctgatgcttattctagctgggaagaaaaacacccaaacgccagggtattcaagcttgaatttcgcaacatcggcgaaagcaatgaatggcaggaaatgatcattatctacactgaataaataaaaagtggaagaactccaagcctagtgtgtttcttccacctttttacttattttgattttctttttccttcaatttgtgcagaatccgttcattttctttagtacgtttttcaactgctgcatcgatgatcgaatcaaaccaatgattatcagaatcatcgcttgtttgatccttcttttgaggaccttcattttttacacgtttgtcagtttcttcattaataatggaatccagccaatcaaaattatctggatcatggctcttatcagtcatttatttttcctccatttttgatttaaattaatttatttactattctttttgactataattgagttaacaagatgaaacaagaaagaagtgttcgaaatgaaaattacattcactgacaaggcgcttgactacttaaaaagacgcgaaatcttgaataaaattctaattttaatcgccgacgatggtggtggtaaatattctatcaaaggcggcggttgtgcaattggcagtcacttttccattatttatgtagacaaagttgatcctgattatccaatcaagcttgaaaacgaccaaggaatcaatatttacacttctaaatacgacaccacaatgatgggaccaaatttagtggttgactacgccaatgcatccctcaacttaaagagtgacgaaggattgcttgatggcggcgttgatatcggcaatggcgccgagttaattaaagctcaaaagaatgtaaaaatgaccggcgttgaatggcgttgctagattaagatgatcagaaaagtgtctgggaaaaaactagcttccagatgaataaaaacgatcaagatttccttttttaagaatcttgatcgtttttttgttctctttaaaatttttaacaataaaaatcggcccttcagccaccttctttgacaatatttgttcaaattcatcatcataaaggcaattccgatatcggtttcgaccttctctttacctcgcaggtgcgttctgcgcatgccaaatacgttcttcaaatgtccgaaaactggctctacatcatattttctcatgccatagatgtgtctgccttcttcgctttggagaacttcttttgctttttcttttaaatattgccagttaggattatagcgaacttggcgctggcggccgctagctgttttagccaattgttccaattctggcgttagctggaactcgtctgcctcataaaccttaaaatcacggacctgaccagtagaacgatccttgcgctggctgtaatatttgaaattgaatctgacgccatgatgatcaatgtaataatcatctttttcattgtagtaccagttgattagcttagttggatcattcttatactttttggtctgttctttttcatacatagtgtagggaataaagtacttcttgtctggatatttttcctccagcatcgaataattgtattcactgccatagccagcatcggcgacgattttgtcaaacttgtccaacacggtcatttgatccaaaaccggctccaaagttttgaaatctgtcggattaggaaagatggcataatcaactacatattgatcggtcgtgactgcttgaatattgtagccaggctttaattgaccatttttcatgtggtcttccttcatatgcataaaggtggcgtcatgatctgttttggaataactgttgcgtccggcaaagatctcttcggcttcttcatatttttgcattcttggcacataatcttttcttagccggtgcagaatcttttttagtccacgtcgcttggcttttcgaggtgaaccgccaggaatggctttgttttcctgctcaatctctttagtcagcttgttaatttctgcttcagtttcttgagctaattcctttagcccctgactagtttgaactttttctttttccatttctttgactacttctttagtaatcaattcatcataaagttcaactgcctggcctttcagcttttcatgatacttttcaaccgctttgcgccagacaaatgtatagcggttagcatcagcttcaatcttagtaccatcgataaaagcagcaccttcattgattaagccttcatcttctaacaggttagtgaagtagataaagctctttttaatcagttcattggcatggctgcttgatctaaaattattgatagtatgatatgaaatcttttgctggtcagccaagatcatcattggcagattttcttccagcatcaactcaatctttctgccagaaaaaactcttctggagtaagcaaaaagcagtattttgagcatcatggctggatgataggctgggcggcccgttttagcagtcttgcctactaaaacatcttctggaattgaatctacaaaccagctgatgacattagccaaatgattggccggaatggcaaaatctagattaagtgttaaagcagtttgacctgtgatataattcttgtacatgttagtttccaccttttttattttgtgatgatttaataatatcaaggctggagctaaaagtatacaaaaagagcgttgaaacaaaaattcaacgttcttttttcatgatctgagacttagttttttcccagacacttttttctatagaaattgaccactattaggatcgaatccagtacgatctgccgcggtaatctttctaattaccttacatggattccccgctgcaattacattatctgggatgtcattcacaactacactgcctgcaccaataattgaattacgtccaataattgtatctggagttacgctaacccctgcacctagccagacattgtcaccaatgccgatcgaatgtgcaacacaaccaccggcttttcgctcggctggatcaaataaatggttgctggtatacaagccaaccttaggaccaaacaaaacattgtttccaatataaacaggcgcgccatctaaaatcgtgcaatcatagttggcataaaagttatccccaacatgaatattttgtccaaattcacaacgaaaattagggttcacgaagggatgctcacctgttgaaccaaagagttctttgattaatatttcttttttagcgtgatcattctcattattaatattattggtcttcaaggtagcaaggtctctcaaggtgccaaggcgaggatccgcatcattataaggacgaccagtagccatgtaattaaattttgttctaagcgacatgattctttcctttcattagttcttctatttttattatagaaaagaaaaagcgctttcgcatgtttgacgcataatatttagcacactagccctaatcttattgcttattctataatggtaaaaaagaaaggattaaagccatgaaaaacttcaacaaatttaccgctaaatttgctcgccttttacagaatctactagtagtcgcaattggtttactcgggattattctgatcatactcttattccgcgatctaattccactttgccaatcattattttcaactaagatcgaagaaagcaactccgagattatgtcagaaattatcgttttcttactcttctttgaatttactgcaatgattatttcagccttgcgtcatcacggtcacactagcatcaattttctattgggcttaggtgttactgcgctaattcgcagtctgattacttctcatagtaacatttggagtacgcttgccacttctgcttcaattttagtactagtaatcgcaatggttattttcaataaaaatctgcgtaatatgtaaaaaaactgtatcactctaggctaatgtcattggagtgatacagttttttgttttactaattaactttgcgccatgaactcattaagttgtttcttagaaaaaacattgccatatttgcatactacgtttcctttcattattgaacgtaattcacacaaccaaaaaagcatcatttattaacaatattgaaaataaataatgctttttagtaatactctgatgctgaatgccagagtcgaactggcgaccttctctttacgagggagatgctctaccaactgagctaattcagcaaactcacaacacatgaattataccaaatgtcgctaattggcgcaacgacctttttctaagctagcattcaaaaaagaacattatttccaatctaagcacaatccttgcttgtgcaattcttctggcaattgatcacgatcagtttcatgcagatcaagttttttacctgtaatctgcttagtgaatgaatcaatgcgacggttagaatcacgtaagtcataatatgtcgtaactatatcatcatagtctttaaggtctttcacatcaaagtctttcttataactaccttcaaaacaagtgaacttaagtggtaatcgtggttttaattgtggcttttgatctggcataccgacttgcatccccaacactggaaaagtcaactcaggcaaatcaagcgtcttaagcaaatccaacggatgatcgttaaccgtaccaagtggcacatagcctaagcccatactttctaccgcattagcgacattttgaaaagcaagcagcgtatcttctattgcttggaaaaagatatcagttgtgtgaacacggccgtcgtctttgtcaagttgctttctaatttgttggttacggtacaagtcaacgataaaaataaacaaatcgccttctgcaccaacatatttttggttacataacttttgaattttcttcttttcttcaggatcggtaacgtgcagtaagctagcattttgcataaacatgctggttggagtttgaccaaagacagaatacaaagtttccagttgttctttagtcaaagtttgatccttaaattttctaatagaacggtgatttaattgcgtgtcgattgtttcgttatgtatcattttcatccttcttactaataatcagtaagttcattataacaaataatatggctacttttcttcaaattcaattccgtaatctgcttgctctccgtgctcagctaaatcaagccccattaattcatcttcttttgatactctaattggaataatccttttaagtaataaaacgattatcgtcgtcatgatccctacaaatatgatagtaaataaagttcctaaaatctgagctgtaatcaaatgcaacccgccaccataaagcaagccattttcaatttgcgggttaacaatcttagtcgcaaataatcctgtcaaaatcgaacctacaattcctgaaacgccgtgacagccaaatacatcaagtggatcatctagcttcaattttggcttaatcacatgaatgaagccgtaactggctagtgtacaaataaaaccaatggcaaaggctcctgccacagtaacatagccagctgctggcgtaataccgactaatccacacaaggcacccgtacagaggccaatcatagtagtcttttctttaataaacatatccaaaaacatccaaaccacaaatgacgtaccagttgcaacagttgtagttaaaaacgcttgtgtagctacatcgcttacagttaaggcagaaccaacgttgaagccataccaaccgatccataatatactggttcccattaaaacccatggtaagttataatgcttaacctcaccatttggatcaaaatcaattcttggaccaacaaaaattgataaaaacaaggcggtaataccggcggtaatatgaactacagtcccacctgcaaaatcaagcatccccgttttggctagaattccatctggtgtccaaaccatatgaaccattgggtaataaatcaagatcgaccaaattgcgacaaatgcaagtaaaaatttaaatttcattcttccgaccaccgcaccaacaaacaacgccggcgtaataatcgagaacatcatctgaaacattaaataggtcaaaattgtgatgcctgaatccttggaataaagcgtctttaaatcaaagccgtttaaaaagacacttttactcaaaccaaatattccaccaacatccttacccaaagccaagttataaccaaaagcaataaacaaaacgattgcgacacctgtaatcatgaatactgaaatcatcgtattcacagcattcttctttgaaaccatgccaccatagaaaaaagcaagtccaggtgtcataaagaaaactaaaacactagcgacaaaaacaaatagagtgttcgtttgattaatcatctttttttctcctcaaagtaaaatagttagtcctaatattttaaattggtatatacactatttcattgatgttgcagcatatatgcttaattaaaaaatattggtttgataaaatttaattctcattatacactcatttttcttcttgtcattaattttctataaaaaataaaggtgcatagacgtatggcttctatgcacctttgcatatatttgcttttaattatttgttttcgttttcaagattgttgattgcagtttcaaccaatgcatatgcttgttgagcttggttcttagcttgaacatattcgttcaagttgtcatcaccattagtaagcacacgtgcaaatgaaatttgttcagccatcaagaagttgaacaatgaatcccacttcttgtcttcaaacttgatttccttagcagaaattctaggcatcatttcacgtgtggtattaaatgccttttccaaaatttgttcatctgcatcggttaattcacgcacattgtatgcttggtggatttggtgaacctttaaaagttcttttaataaagttcttgcttgtgcatcttttgaaactgattggttaatttttaaagccatttttacctactcttttcttttttattaacaattataccaaattgtcttcgaccatttgcttaacgcagcgtttcatttctttaatatcaagaatactgtaggcaaattcttttctaagtagttcctttggcaaatattgatcgtacttgtcgattcctggcacttcgtttggataaaccagatcaagcggatcaaagtctttatcagcttcttcgcctaaaatgcgccagaagtcatgctcatcagcatccatggcaaaatacatgaagtatggtctagatgaattaaagccacggatatttaactttttaccgcacttaattcgaattaatcgctctagtgccaaaaatgcataagtcccagtccatggaaaaagacaccacatattaccgcccagcttgatcaaattattctttggcagaccagctaaagcggcggtgtctctagcttgcgtcaagcgagctttaccattttgcatcaaatatggatacatcatcttttctgcaagtacctttttcattctctgtaaaattttaggttgaatatctccaggtacatctccaaagtaggcaggaattctaccctttacttcatggcaatatacttgatgacgcttgatatccacgtcttcgacaacccatacacgtccagcaatcgcaatcttgtctcctacaggaggtggcttaacgatcgtacctaattcttcgctgccagcgtgaacactgaattcctcgttttcttggaaaactgcgtaaaatttaaagttattcacaactcgttcaccagcaagaccaacgatcagaccaccatcttcagtccactcaatgtgacctgttttaagcaagtgtttgagcaaaacgcgataatcgtcttggctcacgttgtggaaatatgacaaagttaacacccgtgaagcaagttcagctggcgtcatttcaccgcttgaagccagcgtactcatcgtctgatgatagagcaaactatatggcaaacggttaggttcaggtggctccacccatttttcttccgcatacagttgtaccaaggcaatcccttgaagtagcggccacggaatcagttctggcaacatcgctcttgattcagggtgttcttcgcgcatgacaaagtgcatctctgatggattaccgcggcgccctgtccggcccattctttgtaaaaagccagacacagtaaatggcgcgtcaatctgaaaagcagattctagtttgccaatatcaattccaagttccagcgtagctgttgcacaagtcgtcatgtagacatcgtcatctttcattgcggcttctgcagtttcacgcaaggcttgagacaaattaccatggtgaataatgaagcggtctggctcatgattataggcacaatatgctctgagctcctgacaaacagcttcacattcttcacgactattggtaaaaacaagacactttttaccacgagtatgctcaaaaatatagccaattcctgggtcagctaattctggtgccttatcagttttcggttcgatttggctcggatcaaagtccctggaacttgcttgtggatttgttttataaaaatgttccatagataaatgccaaatctgtggttcattttgtacccttggtgtaacagtttttctgtttgaaccagcacccaaaaacttgctggcatcttctaaattaccaatagtagccgaaaggcctattctccgtggatttacattagctagttttgataaacgctcaattaaacaaaatgtttgtccaccacgatcacttctaagaaatgaatgaagttcatcaaccacaatatattttagaccaccaaaaagatgcggaatatccatgtgcttattgatcataaagctttcaagcgattccggcgtaatctgcaaaatacctgaaggatgcttgagtaacttgcgcttttgtgtttgagctacatccccatgccagcgccaaactggaatatccacatctgtgcataagtctatcagacgatcgtattggtcgttgatcaaagccttaagtggcgcaatatacagaacttttactgaatcttctggctcattataaatttccgacaagatcgggaaaaaggctgcttcagttttgcctgacgcagtcgaagccgacaatagcacattatgatcggtgttaaaaatttcttcggccgccgcaacctgaattggtcttaaacttttccagccatgttcatagatataatcttgaataaatggcgcataatgtgaaaaaacgtccatagtccatttccttaaatcttaaattcggtataatccttttccgcattatccgaaacagcctctgacttggtatagctgaattgatccgagttaagcagatcagtgatctttctatcaggattctgccaaacaatgtcgagcagctcaataaagtcacgaataatttcacgtggcgtgatattggtatccgctccaacacgggcatattcaatcttaataaattgagccaaatcatcatcagtaatcgtgcgctcataaccgtacaaattggcatgcatgtcagctagtttttcagtcaaaaccaacatttcttcagcggttaatggttcaagcttaattactggcgcatacatatcacgtgctccttcttgagcgaatttgcctgaagcaagtcggctgcgtaaagcttcgtatgaataaactccgcgacgacggtctttaactgcttgtggcgtaccacacataataatgcctaagtaccttgctttgccctgcaaggtatcgttgtacatggtcaaaatcttttcatagttgtactggcggctaattgcattcggaattttatagatattaaccaattcatcaatcataatcattaaaccagcatagcccgcttgtctaaagaaagtcgcaaataactttaaatattcataccaatcactatcactaataatgatatcaacgcctaattcctttttagcctcagtcttatggctatattctcctctgaaccacttgactactttagccttagtctcatcatcaccactcatataagcgtgatagtacatgttcagcaatttagcaaaatcaaatccatgaactaattcgtttaatgaagaaatgacgccatagattttctggtcaactgcttgctcaaatttaggatcatcattatttaagcctgtttcttgcgaaacttgcatctgcactgaattaatccagcgatctagaatcaaagtcaaggcaccgccttcaggcctagtcttagttgataagttctgaattaattcacggtatgttgctaaaccctgtccttttgatccttgcagccgacgttcaggtgataaatcaccatctacaacaacaaaatttttatccatcacatagttacggatcgtttgaagtaaaaagctttttcctgagccataacgacccacgataaaacgaaagcttgctccgccttcttgaataacatccacatcgtgtaatagggcctcaatctcggcctttctccccacggtaatataaggtaaccctattcttggcactaccccaccctttaatgaattaaggacagtttgcgcaattctttttggtactcttcttttttgtggcatgatttcatcccttcaaaaacatatcttttaagtcatctacataatcggtaattacttgtggttggtcctgttcgttattttctaaaaccacatcaccgaattcatcaaataatttttcattaatattatccatcaaaattgatgccattaaatggtgctgcttcaaataggtctgccaaggctgctgcatcagcaatgcagttaagaaaaacatttcattttcatctaagccatattcattatcaactttgacagtttcatctgcttgtttttctacttcttcttgcgcttctgcctgctctagctgcttttcctcatccgttaacaaactatcacgcgtcttcgaagcattggcccgaatttgatccaaatcggagaaatcaatcttaatctgatcaatctgcgcctttttttcttgaatgtgatattcagcaatccccgcgtcaattgccttaagtacagcttgatcaataaatcgcggcttaatcgaccgacctagtttaaattctgttcgcgccactctatctaattcatggagaaaattatttaaattaacccgctgacggctgatttgttgatcacaatgaatttgccattttccttggtaaaaatgatactttcttactgcatcaatctgatggtcagctacttgttgttgtcgcagataaaaaacactgcctacaaagattggcttttcaattatatcaggcttgcccacaaacgcactgtaatacgcaatgccgtattttttagcatccagcagctccagccacacgtaacgcaacagttgaacaaataacttttcattcttatacgcgtggtgctagttaaatcgttttagttaataaaaaagtccaatcttgttagactcgacttgtaaatagtaataatagaaaagagtctgatctgattgaactgccttaagcttaagcgttttagccaccatttacaagttagttttaaagatttagtgataatttgtcggcactggtatcgtttgtatgcaccggctgagtttactcatcggcgaaatattgatcaaattaaaactacggacagtctgattttggctttacttatctggcaagctaagacaggaattgaatcacaaagaagattctgtgaatgtttcaattgtttatcacactcacgttttaatcggcgttcacgtcagctattgcaattgatttatcagatacggcaagaaatgaataaaaaggttgacctgaatggacagttcttgatcattgacagctttccggtacctgtttgccaaccaattcgaaactatcgtgctaaaatttttcgcggttatgccaacattggttataaggccaccaagaaaatttacttctatggtttcaaagttcatgccattgttagcgatgacggttacattcttgattatgtcgtaacaaaggcatcagttcatgatgccagggagacagttgaactgatagaaaatacccatccatctaattactatcttcttggcgacgaaggctatttaggcaaagaactgcatcaacagctaaaacaaatgggttacgaactttggacaccatatcgtaaaaatatgacaggagctaaaaagcacaatgatcatcaattgatggctattcgcagaacaattgaaagcgacttttcgcttctgacctattacaatgccgagaacaatcgagcacgtagtctgataggctttcaaagccggttggaaattgcaattttagcttataatttggcttattgtctagaacgatttaactagcaccacgcgtattcttattaataactttagatgaattccaataagtcgttttctttgcaaagactgctgctaactcttgcgcagtaaatttttctggatggtgtaaaacctcataatcatgatcacgcttaatctcagatgcaaagcgctgcttaataatcttttcgtctaaatcataataaagaacataatctttgagccagtcttgtaaatatacatcaatactaatgtcaaattgtcgcacatatttttcttcaaattctaacagcttttcatatccatcttgtgcgtcatcaacaccaatattgttcagtaattcataaatataaacaaaggcataggatgtactcgttttttcaaaaacatgctggcgaatcttgctgcgccaagtaaagtaacttctaagctgcccagtattcatatcatgataagttggataaaaacgcttaaaggcaaaaaattcaggataatcatcatcatagtcggccatcatcctagcctgttgataaaaattcttagctcggccacgactgggcaaaatactgtagtcataaacttctagcatctttctaattctatctggaaccagactattgttatgcttcttgcgaagattttcacttggtttaattgcttgggcttgatagcggtcatctactttatctggtgcaatataaaaatattgattctgggcgatatttacttcatcaccattcatcgccagtttaaaagcaaaatcaagtgcttttttgagtgaatcttcactaactttttctaatattgccccaacccaatctgccgccttgatcttcattggatcagtgaagccaggcaaatctcttattagtgcagccattgcaccacatttcaggtccaatatactctgaccttgcccacgtgataatatcgcaaaataaccactatcaactggtgacattaaaacgtaaacgctagtggaacctggtacagcaggcttaaatttcaaaccatatttggcatagacatatttgaagagttgatttgaatccattttgtctcctttttttcgcacgtacgttcattatatcatcgatttattttttaccaaagtcacgcatgtcagctcctcatgtacatttttaagtttcataaattttatatttttatatttgtgtggttattaacaaacaattatgttactatagtttatgtaagttattgaaagcgtttttataaaagcttcctagagaggacaaaaacttaatatgagtacaaaagaacgttattctcaagatgaattaagaaaagataatccaatgtttagccgcactcgtgccactattgaaagtgcattttacggcaacaatgtccacgaagtaaccagtgttgcagaagcttataacttagctaagaagcaatcaggcgttattgttactgacttgccaatcttacacactaaggaattaggtttgccacatggcgcaacccaattggtttacaaccacggcaagattttaggtagaactgctagcgcccgtcactttgttgacaatcctaatgaagatgctgaagcattggacggcaacctacgtgaagatatttacaaggggcatgaacaaaagtacttaaaggctactgttttagtaggtcttgacccatcattcactgttaaggctcacattatgatgccagaagatcaagccttcaaccttctttcatacatcctcaacttccacttcttcgacgatgaagctgaaaaattatacgaaaagtcaaagttctacgatgaaccagacatttacttctacttcgatccaaatgttcaagacgaagattaccctaagggcttaggcgtgtttgacgctccacataactgtgccgctgtatttaaccttcgctacttcggtgaattgaagaagggtaccttaaccttagcttgggctatcgctcaccgtcacggctacactgcttgtcacggtggtgaaaagtcattccactttgacgataaagacgacaagacctttgcattctacggcttatcaggttcaggtaagtcaactttgactcacgaaatgtacgatggtaaatatgacatcactgttttacacgatgatgccttcattatttcacgtgaagacggttcttcagtagccttagagccttcatactttgacaagactcacgactacccagctggccaccacgagactaaatactacaccactattatgaactgtgatgtaactttagacaaagacggcaagaaagtcatcgtaactgaagacttacgtaacaacaacggtcgtgttatcaagacccgctacactagtcctcaccgtgtagactttgaaaagtcaccaattactgcattgttctggattatgaaggacggttcattacctccaatcatcaagatcgatgacccagtattggcaactactatgggttgtactttagcaaccaagcgtacttcagctgaaaacttacctaagggctttgacatgaatactttggttattgaaccattcgcagacccattcagagcttacccagtttcaggtgactacagagacttcaaggaattgttcactaagcgtggtgctagttgctacagcttgaacaccgacgcatttatgggtaaagacattcctaaggaagttactaagaagttaattgaagacttagctaacggcaatatcaaagacagtgacttcaagccatttggtaacttcaagggtgtatcatacttacctattgaaggctacgaagttcaccttgaagacccagaataccaaaagaccttgaaggatagaatgcaagatcgtttgaactggctcaacaagtacgatgaagaacacccagaaactccaattcaagatgaagctaagaagaccttggaagctatcatcaaggaattgagctaatattaaggaaatgaattagtgtctcattcaattaaaatttaatttcttaatgacgaaaagacgagagttgaaattcagctcccgtcttttttattgctcaatgtaattttgcttctgtagtttggcatctatcagtttataaacttgcactttattctcttgtgcaagttgtggattatagttatgtgctatttcaatgacaatagccggcaattggtagattatcttatgaatggcatcactatttttagggtctaaacttgaacaaatctcatcaagcaaatatatcttcttagaacgaattagacctctaactaaagcaagtcgttgtgcctgaccacctgataaattgttcgcgtcatctgaaattaatttatctaaaaaatcattgccaaactcatgaatcagtcccatcttttttgcttcatgaagcattagatcatcaggtatgttttgcagaagtgatagattctccctcactgtaccttggaataaccagattctttgcgagatcttgatgaaatcggcaggattaatttgatgaccagcaaaggtgatttcaccgttatacttcagattattagcaatacaattaattaatgtacttttcccaatgcctgaagccccagtaacaatgatcttgtcatgatcacgcaaagttaaatttataccatctaaaattttcttatcaccatatgaaaaagacaaatcttttattttcaaaatagcttgagagtcatgattatcttgtttaacactttcactttcttcaaaattatagctttttatttttctaattgcatcggtgctatgaatttgagtctgatacaaagcaattgttcttagatatcccacaaccctatcagctgacaaacttaaagttataatggccgctaccgttacgttaaaccagcctctctgcataaaaagcaagccaataaaaattggtagcaatagtgtaactaaagagattaaccatgcaatgaattgtacctggaattgacaattattcatcttacgatatttgtcttcctcattaaccaagattcgatcaaatcgtttaaagaaaagatgtctgacaccaaaattcagtatttctaagcgtccttcaaatatatccttcattgcctgaatcaactgtgagttagatttattccatttttcggttttctcattcatcctcttcttgccaatatagcttggaatcagggttagcgctgaaagaagcaaataaataattcccaaaatcagattagtttctacaacaactattgccgatgcaaccacattaaatacaaactgaactatgtcagttatcccaaagaaatatttttgttcaatttctttagcagtaccactaatcgaattgattacatctgctcctcttgcttgcttcatgtctgaattagcaaatttagaataaaaatattcttgctttaaagcaatatttaatagcatcacaattctattttgaaccaaataaaacaagagcatggctatgtagactatcagatatgcgccaaaggctaagccaataaatttataaacgtggtcaatgttactaaaattgatattagttaattgtccaaacagtacagcatttaataccccttcaaatgctgaaatggccgataaaaccagaaaaactatttgtaaatatattggaacatgttttactacccatttaaaatttatttgttgtgtgttcattgtttaatacccacatatttctcataatcaacaagccaatcttcatcatttttataagaatgattcatacactttttaaacccaattgctttaaatcatcttcatctttagtttctaacaattgtcgctcttctagagacaagtgatacttattcactaaggcatcaatattctccaaagaaatatttttaccatcagaaagatcctttcttcataccttcagacattactatacctcctattttctctcgttaagtaatgcataattttcaacttgcaatttactgtgtatgggattgatatcaatgcttcccataattccccaaatgcttataataataacagtaagtattctcttattttttaatttcaaagccaggaattcattatgtacggtcaaaaatttaaagcacttcgtcttcaacaacatatttcactagagcaagctgctaacagagttatctctccatcgactttatccagatgggagaataataagattgatattcgcttcaatttagttattaagcttttagacaatattcatataaacctaaaagagtttactaattactgcaaaattaatcatagtaatccatttgttgcgaaagtggctatgtactatgaagccaacgatgatcgtcatattttgcaattaatacaaagcaagaaaaaagaataccaaaattcacataatcaatttgatttacttctactagctatcgcatgtaattgttattacgatctaactgataacaatgttttcccagtgagctatcaaaagaaattattctacattttatctaacattgaatattggacagagatgtacatcaatgtttttggtaacactgtttttctctatgacagcaaggaactatatagtatttcaatcagaattcttaaaaatttaaattctaatacatttaatgattttcaagaatattattatgctttatcctctgtcatcaacgccctaaccgctctaattatcaaaaatcccaaattagcatcacagcttttaactaaaatagagaaagtttcaattcctaaaccaatctcttacttaaaaattagaactaatgtcctcaagtatcttttagattaccgtttaggcaaaacagatgaaaagcttatctcaattaagctagaaaatttaaagtggttaggattaacagatattgcaaaagacttaactttcttctttaaccgtataaaaaatgatcgttcacctctttcctaattcatttgcctattatattaccctcatttttatctaattgatttttctttgcaaatatgcaaaattatttttagcaagaataaaaaagcctattaaatctaggtgtttacaaaccctgatttaataggtcttttatgcgtcttttttattgctcaatgtaattttgcgccttagttaaaatatccatcttctcatgttcagttaaatacttttgtgcttctgccaaattgacccatttactagctaaaatttcttctttttgaatgttaacctcttgtcctgcaacatagctagcaacaaaataaactactgtcttagctttatcaacagtcaactgatattctgttttttctctaaaagtaaagtcaaaattcggctttaaaccaacttcttcaaaaacttctcttctagcagcttcctcagctgtctcattattttctaaatggccttttggaaagccccaattatgatttacgacgctctgcacgatcaaatatttcagctcgccgcttctacgttctctgtaaataactgcacctgcagaatgttccatcttcatttttgtcacccaacctttatattgcataattattaaatatttattaacgtatgtcaagcaattgtaatcaaaaaaatgaccagatctttgacgatctagtcactttattcgcagacgaaattattaagttctattggtagaatattttaagttacttcttcaagttcttttcgcagtattccttgaccttgtcatcatcggccttaagaatccattcaactgcagcctcagtcttcatggtgtctcgaccatttacttccatttcgtggtcccaaatagcgtcacgaataggcatttcattacccttagcccagtcaaaaacttgatccatatttctatcaattaatgcagtttcttcaatttcttttgcatctgccataattaaaagcttcctttctgataacgactttattgtagttctattagctacaactgttaacaaaaagggacttttttatttaaattctaatttttgccattaactgcttcatcagccttattcactacactaaccgcattaagtgaacgaggataaccaatgaatggtacgttttgttcaatgaccttcatcaagaattccttgtcattgcctaatttgatatttgcttgagcatgggccatcaattgaggttcacagccaccttgagctgcaatataacagaaggtaatcatttcacagtcattgtcatccaagccttttctagtgtagtaatcgccaaagcaattatcaactaaccacttattgattgttcccttcttggcaaaacccttcatttgtggaccaaacaagcgcatttgagtttcctcacccttttcaaggcgattgtctagtgtagtagttgcttgacccgcaagaggtaattcaacgccgcgcttagttaaaacatcattagtaatcttgaaaaatggggaaactctacccaaacctaaataatcaaccgcttgatataaacttccttagcttcaactgggttaacaccattgtctagtacgactggaagcattatttcatattcttccttgccttgcatccccaacaaataagctaaagttgacaacatcttagtccggtcgggcaaatcaacgtctttttgcacttcgtcaaaagcaaaatgattaattctttccaaagcttctggatcagtagccttcaataagttggcatgtactctttatgcatcttctttaattgacataataaattcctttctaaacgcttatctctactatttatttaagtacgattgagtctaaaagaaaaatatctattttttattctgcaatataacttattcttatcaaaaaaatatcctaaaggctttttgccttcaggatatttctattaggttatttaattagtttttcttgtctgcttcagcatcatggtatgacttaacgatttcatcaactaattctggatcatctttcaaatcagtagtttctacaatgacatccttcaagtcttcatctttaagcatttgcatcaacttaacgctttccttgtcgttaggttcatcaaagtgataaattctaccaacagtttccatcaatgcactgtagtccaaacctctgtccttcaattcacggattggacggataaatctttcattgtagcctaacttacggattggagttctaccaacacgagcaatatcatctgaaatatatgggttttggaatctgctcaaaatcttgttgtggtattcttccaaactttcttcggtgaattccttgttccacttgtggtaaagaagtgaacgggtttcactcaagacacgcttaacttgctttaaaacaaatggatccttaatagcatccccaatagtgtcatagccaaggctcttgccagtataagcaacagttgcgtgtcccgtgttaactgagaataactttctttcgatgtaaggttcaaggtctggtgcatagtcaacgccctttaacttgatatccttgttcttcatttggctttcgtcaataacccattccttgaagtcctcaactgagacaaacaatggatcgtcattatgttggataggaacaattctgtctacagctgcgttagggaagccaatgtacttgtctagttcaggcttaacgtcatcgtccaagtgcttataaacttcttcttttaagtgttctgaaccgccaatcatgttttcacaagcaatcacatcaagtggagtagtgttgcctgattgaattctagcagttaatcctttggcaattaatggagcaatgattgccaaaatctttggaccaatggcggtagttatcatatcggttgatttaattgcttcaactaccttgtctggatccttagcattgttaattccatcaacatttgaaacatgaattctcttcttaccaggtgcggctaattcaatgtcatattcaccacgcttgtttaattcatcaataatagtttcattaacatcaacgaagtcaatgccaaaaccattatctgctaaagtttcaccaataaatccacgaccaatattacctgcgccaaaatgtactgctctcatgtttaatctcctacgttctttaataaatcaataatttcttctggtgtttgtgcgtctgcaagctttgcaacgttggaaacatcactacagaaaatagcaatctgtgacaaaatatttaagtgttcattgttcaaaccagcaatcccaaagacaacggttaccaattgctcggtatcatccttagggtcactaaaatcaacgcccattggaatttggactaccgaaattccagtttttttaatgtgcttcttaccttcgtcagttccgtgagggatggcgatgaaattacccatataagtcgacacatcttcattacgggcaagcattgaatcaatatactctggttcgacacagccgccatcaactaataattgaccggccattctaattgcttgatcccgcgttggtacgtcttgattaagtttgatcatttttggatctaattgtaatgccatttagctcatccctttctaattcaacttttgaatagcttcgccaagctttttatctttaagtaaatcatcaacaactagggtttgaatatcactgtatctgacagccaagttcttattagcagctggagtaacaattactaagtgacttggatcatcagtcaattcgttgattcttactgccttaacaggagtagtcttaccagccttcttaattgcgtcattgaataaactagttgccatagtagcggtacctaagtgttgatcgtgacggatgaagtccacttctttaactttactgaagtcgattccttcaagtgaaccaaccttcttaactggtttttcagcctttggcttatcttctacttgagttaaagctttgaagctagctacgattgtgtcatatttcggactactcaagaagttgccaaccgccacgtgcattgcatgtggagtcttttgtaaagcgcggtcagctaattcttcttgcgtgatgatcaacaaaccatcttcatctttcaagtttctaacagcggtattggttactgaaaccttaatgccagccttcttgaatttatcacgcaaaagtgaagcacccatagcagatgaacccatacctgcgtcacaagcaaagataattttcttaacattggcatatgacttaactgattcatgtgcatcttcagcttccggcattgattgacctttagattgggccttcatggcttgcatttgggcttgttttgcttctaactcatcaccagtactcttgtcgtttttaagaataattgcggcaataatgaatgaaacaactgcggcgccaagaacaccaacaatattaccgaaataagcatcctttgcggaaacaagcaagatagctaaaattgaaccaggtgaagcagctgcttttaatccaccaccaatagcggctaaaatcaatgatggtttcattaatacatatgggaagtaaatttcatgaaccccaccaaagaattcaatgatggcagcaccaggagctgagctctttgacttacccttgccaaataaagtaaaggcaagcaagattccaagtcctggacctgggtttgattccattaagaacaaaactgacttaccaacttgtgcagcttgttggatacctaatggaactaagatcccgttaccaatagcgttgttcaagaacaaaactttggcaggttcaataatgatgttggctaatggtagtaagtgaactctaataattgcatttactcctgcactagcccattgactgccaacttccataatcggtccaatgataaagaaggcgaaaatcgcagcgatcatgcctagaataccaagtgaaaagttattgtagatcatttcaaaaccagatttaatcttgtcctggaatacttgatctagtttcttcaataaccatgcactaagcggacccataatcatggcacctaagaacattggttgatcagtaccaacaattacacctaatgtaccgattgcaccagcaatggcaccacgttcttcataaaccatgcgaccacctgtataaccaattaacagtggcaacaggtaatgaagcattggttgaactaagttattaatttctttgttagggaaccaaccgtgtggatacataaagaatgcagcggtaagtccccaagcgataatggcaccgatattcggcatgatcataccggataaagctgtaccaaatttttgaaccttcactttaacagaagatttactttttgcttgagccattttcttcttcctctctcatcaacttacatttttattctaagtcaatcagtaagcgcttacaatgaaatgaaaatagaactctggcacacttttgtgccagagtctgagtttacctattctattaagcttttgaactattggttacctagtaaccgatctttgaggtcttgtaaaaaaagtgccgcaattgcttctttaatttctttttgactgccatttgtaaataaatctaagttttgactagacatgataatcatgctggaaatagtactcattacccgctgttcgggtgcagtaagattgtctggtgccagcatcaaaagaactcttttgacttgaatggtatcatgatccattgattggagcgagatttcattatctaagtcaaacatggtaaatgaacagcgtgtaatttctggactacgtgtgtgtagcaatgcgatatggctgttagggatgccaactggtgccattcgtacacgtttgagaagatttttggcaacgggcatttgcttacgaattagtgttgaatccgaatgggctaaacattcctgaattactgcaattaagtcttgcgaattgtattccagttgttgaatcttgattccgttgactagctccgagcaaaataatgtactaatcgatagcttagcaagttgttcgactgaatggggatgtttttcttcaactacctgtttagctggaactggttgaggatatttttgttcataatcttttaagtaagcgcggatttttattaattcatcatcaagcagtaatggactaacaagtaaataatctcttgagaagcccttcaatctcaaggttgaaaaaataagattgtaatttgacaagtctatttgatttaaggcagaaacacggctggttttgacttctttgatttcagaaaattctctttttagtttggcacctaagattgccgacgttccaatgccattttcacaaattactagggccgataaattacgctgctgattgcgactcgtgtattcattggcaaaataaagcaagatcaactgcaactctgacgctgtcaaataattttctggaaacgctaaatgccaatatttttgaatagctagatataaatcaggaaacttttgactaaggcctgccagaatttcaataggtgtatctggtaaaagagctactttatgttgtactaaaccaataacgtgtttcgtcactttagtcataaaactatgatctttttgaaaatcccaatgcatttcttcagaaacgtgttgaacgaattcttttactttgactgagattgctaattcgcgctcattataagtcaagtaagtgttgtgataatcacatgataataacttattagctaagtatgagacatcattttggtcaacctcaacttgccgcttttgcgcaaacaaggccataaaacggtaaacataaccctgatatttaagtgaatcagcactggggtggataaaatctagcttgcatcccgccagagttctttttatcgttaccgcaaaagttaaaattaactcaatcagcttttggtcactgtctagcttaattttaccaaacacgctttttttaagacaatcagcaacctctactagcaaagccttatcaatcattgtcaaaaacatgtctttgcttgtcgtttcattatgcagatacttaaaaaagttatattcattgatctgattgagcataatatcaactaaaacctgacgccgtattttttcaggcgcctgaattaacagtcccacaccctttttgcggatcaagtcaatatgatatcgttttagcgacctttcaaccgtattcaaatcactttgaatcgttgcttcactgacattcaggtcaagcgcaaattgaataattttacatggctccgtacttaaaagcaacttagctgcaattatcttctctcttttagctaccgaaattacattttgactgtgagattgttgcacagattgcttaatttcttgtaattgctttgaatcgccagataaaaaatattttcctttttgattttcaattttaaagtcgttcttctttaaatcgccaaattcgcgataaaccgtccggcggctgatctttagactctcttcaatttgtttgatacttaccccactcggatttcccaacaaaatttgaagaatgtgcttttgccgttgtgttaaaaacatcccatcatcctcgcttacgtttaagtttattatacttgaacgcaaaaaaagaagacagatctcaaatctgccttcttgaggatatttatttacatattaattattcaacagtaacactcttagcaaggttacgtggcttgtcaacatccaaacccttatcctttgaagcgtagtaggcaagaagttgagttggaactactgtcaaaagtgctgacatgtagtaattaatttctggcaacacgatcgtgtcatcactatttgcgaattccttgcctacaatagtaattactgaagcaccacgtgaagcaacttcttgaatattaccacgagtaagatctgcagtaactggatcgttaatcaaggcaataactggagtgccatcttcgatcaaggaaatggtaccgtgcttaagttcagctgcagcaaagccttcagtttgaatgtatgaaacttccttcaacttcaaagcaccttcaagtgcaacagcgtgatcaataccacgaccaatgtagaatgcgtttcttgattttacaatatattgatcagctaattccttaagcttttctttaccgtcaacaatttgttggataccttcagcagcgatggctaaatcatgttgtaagtcccaatccttagcatcttgattaccaagtttttcaccaagtgccttagctaaaatagcttgtaaggcaacttgtgcagtgtaagccttagttgaagcaacggcaatttcaggacctgcacctaaaagcattgtgtagttagcttcacgtgataaagttgagccttcaacgttagtcatagtcaaacttggaataccacgcttgttagcttccttcaataccacgcgtgagtcagcagtttcacctgattgagtcaagaaaataaagaatgggtgcttgctcatcattgggaagtggtaaccagcttctgaagcgtaaccaacttcggtaggaataccagtgtagtgttcaaaaatagttttaccaactaaacctgcatgataactagtacctgcagcaaagatataaaggcgatcagccttagaaatagcatcaataatatcttgatctacctttggttcaccattttcgtcaaggtagttttgtgacatgtgacgcattacgcctggttgttcatcgatttcttttaacatgtagaattcgtaagtaccctttgaagctgcgttagggtcgatgttcaaaacgtgaggttcacggtctacctttttgccatcaacagtttcaatagtgtaagaatccttggtaatgtcaccaacatcaccatcttgcaagtcaacaaaagtcttagtttggtcaagaacagaaatagcatctgaagcaatgatgttaaagccatcaccgattcccagcatcattggtgacttgttcttagcaataaatacgtggtctggttctgtgttgtcaacaagcaagaaagcatatgaacccttaaccaacttcaaagcttccttaaatgctgaaaaagcgtctaagttcttatcacgtgcaattttaccgatcaattgaacaactacttcagtatcagtatctgagtggaacttaaccccttgcaagtacttttcctttaattctgtgtagttttcaatcacaccattgtgaactagatagaaacgcttggtttcatcaaaatgagggtgagcgttatctacagttggcttaccgtgggttgcccaacgagtatgaccaataccaactaaaccttgttcatctggagtcaacttttccttcaagttagaaatacgaccaacagccttagttaagtattcgttaccatttaaatcatttaagtaaatgccagctgaatcgtaaccacgatattccaagttggttaatccatttaaaataatatctcttgcaggcttacctacaactccgacaattccacacataattttctcctttggtctagtttgctttgaagtaatggactagcttatttttattgttacagtaggtataatagtctttttgcaaaaatcggtcaagtacaaatattcaaaattggtattataattttaagcataaaaaatggctaccagaatttgctccgatagccatttttacttaagtcaattttaacttttattacttgtttttgatacccttaccttcatagcagtctctcatcaattgagaaatttgactaattaatggagctgatgggttagtaacagtgttttggtcgccataagcttcaacagctaattggtccaccttcttgtcaaactcagccttatcaacgccataatccttgaaggccatcttaataccaactgattcagccaaatcaataattttctgaactaatttttcaattaattcagcatcacttgaaccagttaagccgattgctctagcaatttcagcatagtcgctttcagcacggtaaactgagtaatgtggccacatagcaagtttttctggacgcttagcattaaagcgaatgacttgtggcaaagcaattgcgtcactgacgccacttggaatatcaaaagttgaacctacggtatgagcaattgagtgttccaagccaaggaaggcatttgaataagccattccagcaatcgtagctgcatcatgcattctctttctagcatcaagatcgccatcgtaagacttcttcaagttagcgaaaattgctttaatagcttcaagtgaccaaccacgagtgaagtcagttgccatggttgaaacataactttcaattgcgtgacctaatgcttcaaaacctgaccaagcaattaaacgtttgggcagcgtttgcacaaattgatcatcaacaattgaaacatcaggtgttaaagcatagtcacataaggtatgtttaattccagttttggcatcggaaataatagcaattggggaaacttctgaaccggtacctgaagtagttggaatacatacaagttggacaccattaatctttgggaaacggactactctttttctaatgtctaagaatttttggtaagcctcttcaaaactcatttctgggttttcgtagaataagcgcattgctttagcagcgtccattactgaaccaccaccgatagcaattacaacgtctggcttgaagatgttcattctgtgaacaccatccttgatcacatcagtattaggatcaagagttacagccttaaagacttcatattctttttgacctaaacgcttagaaatgatatcagtaacttcatcagcaaagccttggtcagctacaccttcatcagttacgatgaagaaacggttaacgtttggcatgtgacgaaggtagttagcagcgttatgttcgaagtaagtctttgatggtacctttacccattgcatgttatcacggcgtctagccactgttttgatgtttaacaagtccttagcaccaatgttgtgtgagaaggtattggcaccatatgaaccagtacccaaggtaagtgatggcaacatattgttgtaaaggtcaccgataccaccgagtgcagctggtgagttgactaagatacggcaagcatccatcttcatggcaaattcatcaataatcttcttgtcatttgagtgaagaccagcggtgtgacctcgaccaccatagttcaataaatcggtacaaatcttaaatgcatcgtcatggttcttagcacggtacaaagtgaagactggtgaaagcttttcagctgatagtgggaagtttctacctacgcctttatattcagcgataattactttagttgtctttggcacatccacaccacaaagcttggcaatttcataagctgacttaccagctactggaccagcaaccgtaccacgacgaggatcaataaagtgttcctcaaacttcttaatttctcctttgtttaagaagtagcagttccacttcttaaattcttctttaactttgtcataaatttcagtatcaacgacaactgaattttcagaagcacaaaccataccgttatcaaagttctttgataaaacaatgtcataaactgcacggtcaatattagcagtcttttcaatgtaagaaggaccattaccaggaccaacaccaatagctggcttgcctgatgaataagcagctttaaccatacctggaccaccagttgccaaaatagtttgaacacctgggttagtcatcaaatcggtcgttgcatcaaggcttggttcttcaatccattgaacggcatccgcaggagcacctgcagcaacagcagccgcacgaatgattttaccagtttctacacaacatttttgagcctgtgggtggaaaccaaagataatggtatttctcgtcttcaaagcaagcattgccttgaaaataacagttgaagttgggttagttactggagtaacacctgcaataacacctttaggttcagcaatcttagtcaaacctaattccttgtcttcttcaatatacgccgacggtcttttcgtgacgcaaactgttccagatattttctgaagcatacatattcttggtagttttatcttcaactacaccacgtttagtttcttcaacagccattttagctagtgggtaagcattttgttcacctgcagtagcaactgcttcacagatcttatcaacttgttcttgtgtgaagttagccatttgatctaaagcgacatgtgatttctttactaagttatcgaccatgtcgtagatttgctttttcttttcgtcctctgtaagagtctctttttgttgtgtcttagccattgtattattacctctaagatctactaattcttgtgaactaatttacaatgtcaactatagcacaataactttatttgtaaatgcatgaatttatgaaaatagtgaattaacaaagattcacatttcctcataatttcgctctaatgcaaatgaaagctattccttaattatttgtttgtgaattaacaaacttatttttaaaaaacagatttttgatatttttttaaatctaactatagagtctggtcatactaattgataatgataaaatattaagtatatgtgaaaagattgagaacattgggggggcttatatgagtgagaaaaaaacacagaccgcttctggttataaacgaaccctaagcaatgcacacattcagttaattgctttaggtggaacaattgggaccggcctttttctgggggttggagacagtattcaccgcgccggtcctagcgttatcctgatatatattattgtcggtatcttcctcttcctgctaatgcgggcactgggagaactaattatgtccgacttgaacaagcacacatatattgattttattgaacaatatttgggtaaaaatattggctttatcacaggctatttgtattggttaagttggattaccttgggtatggccgaaaccacggccctaggaatttacttcaagtattggtttccaacactgaaaccttggattccaggaattattaccattgtgatcttgctgttaatcaatttaatttcagctcgtgtctttggcgacttggaattcagttttgccattatcaaaattgtcacgattattgccttcgtcatcttgatcctttacttactagtaactggtggcaaaaccagctttggtcctgttagctttgctaaccttgacgatcatggcggcttcttcgcccgtggcagtaaaggattcttacaaggatttcaaatggtaatcttcagctttattggagttgaattaattggtttaaccgcggctgaagcacaaaagccagagacaacgttgaagcgagcaatcaatcaattaccaattcgaattattttgttctatgtcatggctattttaggaattttgttagtaattccatggtccaaagttgctactaacgctagtccatttgttgaggccttaggtgctactggtattaaaaatgctagttctattattaattttgtagttatttcagccgccgtctcatcaactaacagttttttgtatagtgctggtcgattacttttctctgttacttttgacggtaaaggaaaatggaataaaacttttggacatttatcaagaaggcagcttccacaaaatgcattgactttatccgcattattgatgggatgtgcaccactaatcaccttggttattggcgatcaggcctttaattttatctcatcaacttcaactagtatgtttttaatcatctggagtttgatgattttaactcacatggcttacaggagaaaaacagcagctaatcagctaaacgattttcaaatgccaggttacccttatatcgattatgtaatcttgtcattcttcgttttaatgattatcctgctattgattttaccaagctaccgagtaccaatggtcgctgcaattgcaatctttattgttttatacatcatttccaaaatttggagtaatgaaaaagctgtttaaagcaaaaagtcgagttttttagctcgaccttttattttgcaatttttttaattattttagcaggatttccggcaactaccgtattagctggcacatctttggttacaacggcattagccgctacaacggcgtttttacctaccgtaacgccaggcaatatcgttgctttagcgccaatccaggcgttttgtttgataacaactggctttaattccagttcttttctatgctgtggatccagcttgtgattaactgaaatcaggtaggctccaggcccaatcaacacatcgttctcaattgtaatcccgcctaagtcgaccatcatcacattggcattaataaacacgcgctcgcctaatttgatgttgtgcccataatcagaataaaatggtaaccgaatctctatactagcagctattttttgaccaattatttcactaatcaattgtctaacttcacagctacaatgccgttgtgtatttaaattctgcaataatcgctgattctgttgggctagttttcgacgtaaatcgtgatcttctgtttccattattaccactcctttttcttgctctacttcagtttaaagggtaagcttatcaatgtgcaaagcttataaggtatgaagtataataacaattgtttataggtgatttaaatggaattacgtgttttaaattattttgtcgctacagcgcaagaattaaatatgacgcgagctgcacaaaaactattagtctcacaacctgctttatcgcgtcagatagcagatttagaggatgaattaggcgttaagttattcaaccgccagccgcggcacttaaccttaactcctgcaggacagtatttatatgaacaagcaaaagaaattcttactttagcttccaaaaccaagagtaacctacaatctagtgctgtcatcagtggtgacctaactattgctgccggcgaaagttttgccatgcaacgtctaatgaatatcgtcagcaacattattcgggattatcctacagttaaaattcatattctaagtggcgattatgaatttgcagaaaggcgtttagatacaggtgcagttgattttgccgtaatcattggtaatctacctttagataattatgcttctctgcagctccctgagaaggatacatggggcgttttaatgactaaggatgatcctctagcaaaaaagagtgctattacagctgaagatttagttggacgaaacgtcttaaattcacaacaagccgaaaatcgaaagtactttgattcatggttcggtaattataaagagcaaattaatatcatcggtactgttaacttgaatttcaacggtacacttttagttaaaaataaagcagctattatgctcacactcgataagctagccaatatatcagatgaatccaatctaacttttagaccaattactccaatgttaaaacagccggtaacagtaatttggaagcgagaaaccaataaatcacctgtagctgatttattcctaaatcgtttacgagcatcaattgatgacgattaacaaaaataacctagatcgaattgatctaggttattttttactttatttctttttacgactaaaacgttgcttcaatcgttgccataagcttaatgccctgcgcatatgatcagctggtacatattttcttattgctcgcaatacctttttggaatcacgtgccgcaaaaacaaatttaccatttgacttagttctgatttcaaaacgcggaatataacgtccaccaaagcggacatctgcaaccacataagttacttcattccaaggaatctgaacataatcttcaacgtttcgttcgttataaaattcaaaagctctatcgccgatcatgattttgccgtatgatgcaattcctctaaaccaggttgcatcaacagtgagatcgacttttgtattaattgacttagccatttattaaagaatgccccatacgtggaagagaacaccgacaacgaagataccgatgataatccagattggtgaaactttcttcttcaataaccacatacagaagaaagttaagagcaaaccagctaaaccaggaattaattggttcaagttgtcttgtaaagtagtaactttagtactgcttaaagctttaccgttacccatatcccattgttgaagagcggattggatacctttagcacctgatggaagcttgtcccattcgatgtaaccacccttttgaataggagtttgagaaacaattggagtgaacttgatgtttacccaacgttcaattaaggcacccaagacgaacatacccatcattgaagcaccacgggtaaccttttgaagcataccacctgacatatcactggtgatagctgaaccagccttgtaaccaaattcttgtgtgtaccataagaatgcgattctgataatattccagataacgaagaacaagataggacccattacgttacctgcaatggccattgatgcacctaatgcaccaacaattggacgaacagtgtaccagaatacagggtcaccaacaccggccaaaggtcccatcataccaaccttaacaccttggatagcgtcatcagtaacttctgcaccgttagccttatcttcttccaaagccaaggtaacaccaagaacaggtgatgctaagtatgggtgagtgttaaaaaatactaagtgtctttgtaaggcagcagataaatctttcttgtttgggtataactttctcaatgctggaatcattgaataagcgtaaccaccgttttgcattctttcatagttccatgaaccctgaaggaattgtgagtgccacataacgttaaaacggtcgcgcttggttaatttagttttcttatcagccattatataaatcctcctctatgcgttcattttaatagtcatcaatgatatcgccgagtggatcgccagtgccggcatcgccagaattattgtttccaccgttgccacccttagcttcaagagctaagtacatcaaagccattgaaaggccaatagcaccaagggcgatcaaagttaagtctttgatagcagcaagggcaaaaccaattgcgaagaatggccatacttccttacttgccatcatgttaataaccatagcgtaacctacggctacaaccatcgcaccaccgatagtcataccttcgtttaaccattgtggcatcattgcaagccaacttctaacagtacctgaagggattgctaaaagaagtgcagctgggatagcaattctcaaaccttgtaaacatacggcaatccattgccataagttgatcatacgccagttacccttcttagcttctgcgtccatgatgtgaacgatagcagttgaaatagtacgtacgatcatagttaagaacaaaccagcaacagctaatgggatagcgataccagtagcagtaccaatacccttaataccttgaccaccttcgatcaagataatagctgaagctactgatgctaaggcagcatctggtgcaacagcggcaccaatgttagcccaacctaaagcgatcatttgtaatgaaccacctaaggcaacacctaaatccaagtgaccggttactaaaccgatcaaagtacaagcaactaatggttggtggaattgccattcatccaagataccttccataccggcaagaaaggcaacaaacacaaccaaaatcatttgaatagcgttcatttatttactcctaattatttattactttttttcgtcaagtaaagtttgagccttcttcaagatagcatccatattacctggagcatctgaaggaacttttcttacatcaaacttaacgcccatcttttcaagttcacggaatgtatcaacgtctttttgattcattgataatacgttgttggcgttaacatcgccttccttatatgacattgaaccaacgttgatattcttaagatcaataccgcctttgatagccctcaatacatcttctggattttcaaacaaaagaagtgcatgagtgtttccaaatcttggatctttagcaatttcttgcatcttcttgagtggaacagtatgagccttaacacctgctggtgcagcttcacgaatcatactcttacgtaaatcatccttagctacactatctgaaacaacaattactctatcaggcttcatagctggaatccaaccagttgccacttgaccgtgaagcaaacgtgaatcaattcttgccaaaacgtacttgatatgaccatcaccaataacagtaccttctggaatgctcttcttactgcccttagcagcagctttgtcagctactggagctgcagcagccgtcttaggcattaagtcagctggcttagtcttaattccatctctaccaggttgaacaactgcagtggcgatgtgctttgcagttgcattagcatccatcattctctcagtcaatgcttgtacaaccattggtaaattcataccagcaacaattgcccatttatcatgcttttcagcaagtccatttgcttggttaaatggagtaccaccccataagtcaaccaagaacaaaacttcatcttggttatcaaatgaagcaattgctttttccattttgccacgaatgtcatctggaccttcatcaggctttaagataacatgtgcaaaattatcttgttcaccgaaaagcatttgtgcagattgtgcaataccatcggcaaagccaccatggctggctaaaacaattcctaccatgtaatttcctcctctagatcaaaaaatgaatccgcttttattatacgataaatatagactttaaaaaagtgttttttgaaaataatttcataaagtgccaatttgtttcaagcagtccaaatgccttgtctcccaagcaaagacagaaattagtctaataaaaaaagaaagcctgttttcatgatttgagtcgtttttcacaaatttggcttcctattaaaatatatgctggttggataatttcattttcataaaataacaaaaaaggaagccttccgcttccttctcccctttactccggctgtcagactcgaactgacgacatcttgattaacagtcaagcgctctaccaactgagctaagccggaatattaaaaaagagcacggcagcttcctttcctcgcaggcagttgcccaccaactactttcggcgttaagaagcttaacttctgtgttcggcatgggaacaggtgtatccttcttgctttcgccaccgtactcttttgagcttttacactcaaaactaaacataatccttctcgcaaaaaaccttccagtttgcttcgctttggtcaagtcctcgactgattagtactggtccgctccatccttcacaggacttccactcccagcctatctacctcatcgtctctgaggtgtcttactgcttacgcaaaggaaatctcatcttgaggggggcttcgcacttagatgctttcagcgcttatcccttccgcacatagctacccagcgatgctcctggcggaacaactggtacaccagcggtgcgtccatcccggtcctctcgtactaaggacagctcctctcaaatttcctacgcccacgacggatagggaccgaactgtctcacgacgttctgaacccagctcgcgtgccgctttaatgggcgaacagcccaacccttgggaccgacttcagccccaggatgcgacgagccgacatcgaggtgccaaacctccccgtcgatgtgaactcttgggggagataagcctgttatccccagggtagcttttatccgttgagtgatggcccttccatacggtaccaccagatcactaagtcctagtttcctacctgctcgagttgtctctctcgcagtcaagctcccttatacctttacactctgcgaatgatttccaaccattctgagggaacctttgagcgcctccgttacactttaggaggcgaccgccccagtcaaactgcccacctgacactgtccctggcctggcttacaggtcgaggttagagcatccttcaaacaagggtagtatcccaacattgcctccaataagactagcgtcctatcttctctggctcctacctatcctgtacatgtttaaaagatactcaatatcaagctacagtgaagctccatggggtctttccgtcctgtcgcgggtaacccgcatcttcacgggtattataatttcaccgagtctctcgttgagacagtgcccaaatcattacacctttcgtgcaggtcggaacttacccgacaaggaatttcgctaccttaggaccgttatagttacggccgccgtttactggggcttcaattcaaaccttcgcttacgctaagctctcctcttaaccttccagcaccgggcaggtgtcagcctctatacgtcatcttacgattttgcagagacctgtgtttttgataaacagttgtttgggcctattcactgcggctaaccaatctcttggctagcaccccttcttccgaagttacggggtcattttgccgagttccttaacgagagttctctcgctcaccttagtgttctccactcgactacctgtgtcggtttgcggtacgggtatgtcatctctggctagaagcttttcttggcagtgtgattaccacaccttcgctacttttaattcactcctcttcacaactcgtgttgctggttagaagcatttgactcttaaccgcacttgttgcttgaacatcgttccatcgcgatgcgtgcttcacctcctgcgtccctccttcgctcttaacgatttgacacagtacaggaatctctacctgttatccatcgactacgcctctcggccttgccttaggtcccgacttaccctgggcggacgagcctgccccaggaaaccttagtctttcggcggataggattctcacctatctttcgctactcataccggcattctcacttctaagcgctccattgatcctctcgattcaacttctccgctcttagaacgctctcctaccacgtgctctttaaaacacatccacagtttcggtactatgcttagccccggtaaattttcggcgcagcgccactcgactagtgagctattacgcactctttgaatgatggctgcttctgagccaacgtcctagttgtctacgcaactccacatccttttccacttagcatagatttggggaccttaactggtgatctgggctgtttccctttcgactacggatcttatcactcgcagtctgactcccgtgtatggatatctggaattcgtagtttatctggattcagtaacccctgacgggcccctagtccaaacagagctctacctccattatcctctccacgaggctagccctaaagctatttcggagagaaccagctatctccaagttcgtttggaatttcaccgctacccacaactcatccccgcaatttttaacttacgtgggttcggccctccagtgcgttttaccacaccttcagcctggtcatgggtaggtcacttggtttcgggtctacgtcacctaacttttcgccctattaagactcgctttcgctccggctccgtcttttctgacttaacctcgctagataacgtaactcgccggttcattctacaaaaggcacgccattgcactttaatgtgctttgactacttgtagacacacggtttcaggttctttttcactccccttccggggttcttttcacctttccctcacggtactggttcactatcggtcactaactagtatttagccttgcgagatggtcctcgcggtttcaaccgggattcctcgtgtcccggcctactcaggattctgctaggcgtgcttgagatttcgcttacggggctctcaccctctctggcttaccttcccagataattcaactatctcttacactgccacgtcgcagtcctacaaccccaaatgataaatcacttggtttgggctctttcctcttcgctcgccgctactaaggaaatcgatctttctttctcttcctgcagctacttagatgtttcagttcactgcgtcttcctttgattagctatctattcactaatcaataatgcatctctgcattgggttcccccattcggatatctccggatcactgcgtacttaccgctccccgaagcttttcgtagttcgtcacgtccttcttcggctgttagtgcctaggcattcaccgtgcgcccttttctacttgaccttactcaagaattctcttctcggtcgctctacaatctgttctctttgattgtctcggttttttgcttggattatattcagttttcaatgtactagctctttttgaggtactaccctcaaaactaaacaaagtttctcagtgtgcttccgcttgctctggatacttctcttagcattcctgctctccatatccttcgcttccttagaaaggaggtgatccagccgcaggttctcctacggctaccttgttacgacttcaccccagtcatctgccctgccttagacggctccttcccgaaggttaggccaccggctttgggcattgcagactcccatggtgtgacgggcggtgtgtacaaggcccgggaacgtattcaccgcggcgtgctgatccgcgattactagcgattccagcttcgtgcagtcgagttgcagactgcagtccgaactgagaacagctttcagagattcgcttgccttcgcaggctcgcttctcgttgtactgcccattgtagcacgtgtgtagcccaggtcataaggggcatgatgacttgacgtcatccccaccttcctccggtttgtcaccggcagtctcattagagtgcccaacttaatgctggcaactaataacaagggttgcgctcgttgcgggacttaacccaacatctcacgacacgagctgacgacagccatgcaccacctgtcttagcgtccccgaagggaactttgtatctctacaaatggcactagatgtcaagacctggtaaggttcttcgcgttgcttcgaattaaaccacatgctccaccgcttgtgcgggcccccgtcaattcctttgagtttcaaccttgcggtcgtactccccaggcggagtgcttaatgcgttagctgcagcactgagaggcggaaacctcccaacacttagcactcatcgtttacggcatggactaccagggtatctaatcctgttcgctacccatgctttcgagcctcagcgtcagttgcagaccagagagccgccttcgccactggtgttcttccatatatctacgcattccaccgctacacatggagttccactctcctcttctgcactcaagaaaaacagtttccgatgcagttcctcggttaagccgagggctttcacatcagacttattcttccgcctgcgctcgctttacgcccaataaatccggacaacgcttgccacctacgtattaccgcggctgctggcacgtagttagccgtgactttctggttgattaccgtcaaataaaggccagttactacctctatccttcttcaccaacaacagagctttacgatccgaaaaccttcttcactcacgcggcgttgctccatcagacttgcgtccattgtggaagattccctactgctgcctcccgtaggagtttgggccgtgtctcagtcccaatgtggccgatcagtctctcaactcggctatgcatcatcgccttggtaagcctttaccttaccaactagctaatgcaccgcggggccatcccatagcgacagcttacgccgccttttaaaagctgatcatgcgatctgctttcttatccggtattagcacctgtttccaagtggtatcccagactatggggcaggttccccacgtgttactcacccatccgccgctcgctttcctaacgtcattaccgaagtaaatctgttagtttcgctcgctcgacttgcatgtattaggcacgccgccagcgttcgtcctgagccaggatcaaactctcattttaaaaagtttgaatgattgctcattccttatttaagatctttgtctcaaatttattgcttgcgaattgacttcgcttcttgtttgggtttttacacccgcacacttttagcgaaactttgttcagttttcaaagtactacctctgtcttgcttttttgcaaagcatacagctttcatattttatcaaaccatcatttctttgtcaagaacttttttgatttgtttttttgtcttgctcaagctttttctgctttcacctgacgacatttaaatatattaccagcttatttacttctttgcaagtacttttttctttttatttgttttctttccttgcatgtctgtttttaagctctcgtcgcatctctcgaagcgactttattaatttaccttattttctccgctttggcaagtcttgctcttcgttcgcaatcttttagaaacgcttggacgcgctgtaattatttctttatttctatttcaatctacctttttctttttgcttactttatttttatccttacgcttattattcgagttttactgttttttctcttaattttagtacaaaatttttcgaaattttttcaaaataattcaaaaaacagtgttttgcctaatttttcactcaaaaatgcaaaaaaagacgtttatcaaattgatatagtcctactttagtagacagtacaaatatataaaattgtactatctatgaaagcaggactttttgtatgtctagaaaaagtaaatttagctatgaagctaagcttaaagcagttaaacaatacataagtggcgaagcatcacctgcttcaattgcgaaagttttaggggctggcaagactacactgcgccaatgggtatatgcatttaaagatcatgggccagaagcattaagaccacataaatataatcaaagatacagtaaagattttaaactcaaatgcatagctgcctatttaaatggcgaaggctcatatgattatctaacaaataagtttggtttgcgaagtgctgcacagttaaagcagtgggttatcaagtataatagtcatcaagaactcaaggactacaatcctattctggaggcttatatgactaagagaaaaaagacaaccctagaagaacgtaaacagatagtgaaatactgcaaggatcatcaatggaactacaaggaagcagctcttaaatttggctgcagctatgcccaagtatacaactggtcaaaaaaatacagcgcaaagggaactgacggcttagcagataggcgcggtcatcgtttaaaagaagctgagctatctgaaactcaaaggctaaagcgtgaaattgaacagcttaaaaaagaaaatgatattaaagaccaagagatagccttcctaaaaaaagtgaaggaattagaaaggatgtgtttgctggacagccaaaacaaagacaaatagcacttaaacaacagcagcgaaattctctttacagtttgatcaaagaatgtcaccgagaatataagtggtcaattgaatggatgtgcaaacaagccaatattgcccggtcagcctactacaaatggcttaatcataagccaagcaaacgtgaactaagagatcaaaagattcttaagcgtattaaagaaatagctgagagcaataacagcctctttggttctcctaagatgactttggctttaaacaatgagctagcagacggtgaggccaaaatataccgtagaactgtggctcgcttgatgtgcgtgaatggcatctatactagcaaggccagatttaataagaggtatcgctatcaagctgctagaccggaagaaactgccgaaaatctattgcatagagacttcaatgccactaaacccaatgaaaaatggtgcactgacattactgaagaaaaaattcctggaacaagtcaaaagatttatctctgtactatctttgatctatatgatcgtttccctgttggctatgctttaagcaagcgcaatgatacagccctagttaacgctgctctgtcaactgcttggaaaagagagcccaatagtcatgcaatgcttcatagtgatcgaggatttcaatttaccaggatgccttttaagcatgagctagaagaacatggcatgccacaatcaatgtctagaattggccgctgtattgataatggcccaatggaaggctggcaaggtttaattaaagaaatgcgagaagttctttatccgaaggcaaatagctatgaagagatggaaaaagcctttaaagcaagtattgaatactatacgcgtggtgctagttaaatcgttctagacaatatgtcatattataagctaaaatagctatttctagccgttgttgaaaacctactaagctcctggctcgattattctcagcattgtaatagctaagcaaagaaaagtcgctttcgattgttcttctaattgccattaactgatgatcattatgctttttagcacccctcatgtttttacgatatggtgtccaaagcacgtatcccatacgctttagcttggctgctaagtcttttcctaaatagccttcatctcctaaaagataatggttaattggatgagcattgatcatcaattctaccgtctcttttgcatcatgtaccgacgccttagtaactgcgtagtcaagcagatagccatcatcactcactattgcgtggactttgaagccataatagtagatttttttcgtcgctttataaccaatatcggctatgccacggaagatcttaacgtgataattgcgaacaggctgacaaactggaatcggaaaactgtcgataatcaataattctccacctacctttacttcctgattccaaccctgacggatacaacgaattagaggcaagagcattcgagctcgacggttaaaacgagaatgagataagccaacgaagaatttacagaatcttcgttgagattcaattccaatttcagtttgccaaatgagcatcgctaagatagaactatcaggaagcttggtctgatcaacatttttacgatgtttaagtccatcaggcgcataaagcttatacagcgagcgacaaatcacatttaaccgattaaaactaacttgtaaatggtgagaaaaacgattaagcttgagatagttcaattagatcagactcttttctatttaaattacttacaacttgagtctagtctaattggacttttttattaactaaaacgatttaactagcaccacgcgtaatactatattaattatgatcctcaggagcgcttcaatggcaagagcgcaggtcaggttagaaaagaagctaagaataatccagagaatataatttcatatccaataaaacaagataaaagatataaagacttttggaaaaagattgatgaaaagaaaaatcagctcgcacaatagcgaactgattaatcaaattaatttatatatttaagctgtctacttgacacggtacggatcaaatataatcattcgataaacgtctcattttatatctttagatgatcaatctttagtgtctattcatcttttttcttacgtttttcaacgccaagtaaactaatccaacctaaaccagcgagtaatgtaccaatcaaacctagtgtgtgtttgtgttcactaccagtttgaggcaataaatcttgcacggacttcggttttgcatttaatttgttagctaattgctttctttctgttttccctattgtcctcttgccagattcaatgtctgctgccttaactgggccgttagcgcgtttctttcgacctgtaggcataccttcatgcttaggattgttattagagtcatagcccttcttatttgctttagaatgattatgcttcttttcactttccttatttggctttgccggtttatctggcttcggctctggatttggttttggcttcggttgaggttctggttccggagtaggtacttcatcttgcttgtaagtaattttaatattactgtcagccgtatctactgaaaccttttccgctgccaccttactttgtgaagcagtgtagccactaaatgttggagcagtatatgcatcccactgagtattaccatctaccctccactcactgtatgtaactttgccagtaactttatcaaacgttactttttgcgtggtaatcagcttaccacctgaaggcgtaatgactgtaattattctagttggagtcttagtaaaagtatccaagtgatcatagttcttacttggatcaccttgcactgggcctgttggaacatcccttggtggagtttctggagtaacgataatggtgtcgtgttcaacccttacagttacagttggaatgccatcagcagttgcaactactgtcttagaaatatcctgtcctgaaacaatcttccatcctgctagagcttgtggatttacatctactgtttcactggtcttgccactaagcggagtttgccctacttctttgccatcactatcaacgtaagaaatcttccccgtttgagtgttgacagtataagtagcagtgacttcactattggcaaccagctttccagtaaccaagtcatatacggcagtccgcgtaaattcaacggtctgtttcttttgatcttctgaaatctgagctagttggcaattcttgatctggtgctaactcgtagttctctggaagcttcaaatcaaggttatcaacagttgagccagcaacgccagacttagtaattgtctgaccaacttgcttgttaccttcttgagtatcttcaaattcaatagttaaagttgcatccaaagtaaacttagcctttgaagaaatattcagcttgtagtttggatttgctttttcaagggcagtaatactttctggagttaagttaattacataaacgccagattcagctggaattccatttgcaaattcataagtcaaacctgccggaactgtaatagcagttggaacattaactttaaagtttgttccatcaattactggtacagtgctttcttgactaccagaaatcgttacattttcttcagctggactaattacataagtgaattgaccactttcagaaactgcatagttaggattatcatcttgcaatttcttcaatcccttagcagttaaggcaatgtagtaagtaccggcatttgttggcgcagaaattggcttaccattggcatcgacccattcataatcaccagctgctaggttagcagtattcaacatttcaccgcttactaaaccagttggagtgaatacaccgaagttggtagcttgagtgttaatcgttgcaggttgaccatcgtacgtcttgccatctgcgcccttactattaccgtcaagaactacattaagatccttttgtttaattgtgtaagtggcagagcctagcaggtcttcagcatccaaggtgacatttccttgaccagcgtattggttaagggctttttgcaagttaacaataccattggcactcagcttaatcgtgtaagtaccatcattaactggtgcgctgccagcattccaaatataatcaccgtcttgcagagcatacgtactttcggtagttgaacctgggaaagtaaagtgaactaaaatttgaccattgctgttaacttgtgcagttgttacagctgtaccatcaaatgtcttttggttagagccattaagttttgcgtcagcagtggctgcagtaactatgtagttagctgttgtcttaaatgtccacttgtagttagcaccattattaccagttagttgcttaagcttttcttgaccagcctgtgacaatttaacttggtaagtaccgacattcgttgcattaccaacaatttgcaaatcgtcagcagttaacttaagtgtctgagcttcaccatcagcggagtaaaccgtcgcatcgtaggttacgttgtacttattcaagttaagtccacttggtaaggtttgcttagcatcataagtcttgctgtcaccactattcagggtaacagtagcttcgccctggttaatgtacccttagtagttacatcagctgctacttgtgggtatgcgtagttagtacccaaagctttttcaatgttagccaacccttgcgcagataattccacgtggtattcaccgacattgcctggggtttgatcaaagatcaagtcaccatctttagcagtgtagcttaaattagtactattagtactatttttaccatacgtatatttacaacaacataatctttgcctggatcaggaacattaacttgccaagtttgtccagcttctttaggtagactccatgaaccagaaatcactttaaatcctggcgttgttgaatcacctgctgtttgatcccattgccaattaccataagtaatcgtgttattagcaacatttaaactaccagtctgggcatagaatacctgtatttgtgaatcaggtgcaaattgttgaccatttttgtcaccaccagcaattacatatttagccgttactgttctcgcttgctgttttactggaatatacaaaacagtgtgaactggacgggcttcataaactgaggcgttctcagtatatgctagagactccttaccctcactagatgtatcttccttattccaagttgggtaaacaaattggtttgctgacctggatcgccgctcttattgtaagcactataagaaacttccttattattttgagtagaaacatctttagtatcttctagactagtagcttttttatcttctgcctgtttagttgaattctgctcggttgaatttttgctagtcaaaggatcggtaccgctaacttctttttgagcagtagtatcgttatcattcttaccagctgtcgtagtctgatcatttccagtatctgtggtagtcttcttagccgactcaacctcttctgtttctactggatccgtagtatccgcatgaaccgtttgacttgtattcatcgtccaaagcaaagttgaaagcaaaacggaacaaactccaatgttcaattttctaatactaaagcgctgcttgccttcaaagtcatttttatttagtctttctattacgcggttttattctattcatctattttaacgcctaacataaatcacaacaaaaagcaggcttaaattatatgcaaaaaaatcgttattttaagttgtcagtcacaacaactaaaataacgattttgcttttttaatctttaattacttaaattaaacctgattccttagtaatcttcttcataccattcatgtaaggaacaagtacatcaggaacagttactgaaccatcttcgttttggtaattttccaaaatagcagctacacaacgaccaacagccaaacctgagccatttaaagtgtgtgccaagtgaagcttgccgtcttcatcacggtaacgaatttgtgcacggcgagcttggaagtcagtacagtttgaacaacttgagatttcacggtacttgtcttgtgcaggcatccaaacttcaaggtcgtaagtcttagcactagtaaaacttgcatccccagttgaaagagcaactacgtgatatggcaagcccaacttttgcaataagtgttccgcattatgagttaacttctcgagttcatcccatgattcgtcaggcttacataccttaaccatctcaaccttacggaattcgtgcattctgatcaaaccacgagtgtcccgtcctgctgaacctgcttcacttctgaatgctggtgacaatgcagtaacattgattggcaacttgttttcatgaataatttcatttctgaagtagtttaccaatggaacttcagcagttgggatcaaagttaagtcacgtggcttatctggatcgtcattatcaacgatggtataaacatcttcgtggaacttagggaattgaccagttccttgcattgatgcatcgtttaccaagtatggtgggataatttcggtataaccttccttagtgttttcatcaaggaagaagttgaagacagcacgttccaaaagcgcaccagcaccgatgtagtaaacaaaacgtgcacctgaaacctttgaagcacggtcccagtctaagatgccaaggtcagtaccaatatcccagtgagcctttggcttaaagttaaattcagtagttgggtgccacttacgaacttcttcgttgtagctatcgtccggaccaattgggtctgaatcagctgggaagttaggcaatctaagcaagatgtagttttgcttttcagttaattccgcaacttccttatctaagtctttgatttccttacctacttcacgcatagcagcaattgcatcgctagcatcttctttgttacgctttttttctgcaatttgcttagaaacgtcgttacgcttagcctttaattgttcactcttagtcaaatccttacgacgcttagtgtcgatttcaactaattcatccaattcttctggcttaatgccacgcgtagccaatttcttctttgaccagtcaagattctcacgaatcaccttaatatcaagcatataaaacctccatgatatgcataaaaaaagagccgacttatccctacacttgggacgaatcggctcttacacggtttcgcggtaccacccagcttcagtctatctagactgcacctctttaccagacgagtaacgacgtcaaaccgtgcaactattaattgcccacattattgaaatctggaagcgactatgcattcactcgcaccaaccgtgaactctctgaagcagtcttaggatttcgtgtttgcatttattttaagccattcttcttttttgagcaaataatatttttctttaaacgaaaaaagtgcactaacttgtgtgtaatcgacagtataaacatactgaaatcctagtgttttaagcaatttctgtgatttttcattatcggcaaaagttccagcccagacttctacttgctttttctttttaaaagcataggtcaaaatcaatcgtaaagcttcagtcatatagccgtgaccttcaaacgactgatctagcaaaaagccaacttctttagtctttaataggccactcttttcatctaagccgcgttcatacaattcaaccagaccgatcacttcattgttcttgcgcaagcaaacgacataactttcaggacgcgacatatattgcttcacgccattaaccgcctcagtcagattgcggtattcctcaaagccagccatcttgtggtagcggggattgccaccccacttcagtaattgctgcgcgtccctttcttcaaaaggtctcaaatatattctcttagattcaagcattagttacccatcagcttcaagagccactttgcaccaaactgtaggcctatactataggccgcaattgtccatggcttacacaaaataataatccaaaaataagtccaaaacttcattttagtcaatcctgctagcaggcaaagcacgtcatcgggagctgctggggcgagaatacataatgcaaagaaccaattaaatttattctgattctctgtccacttcatatatttatcaagcgtttcttccgaaacaatatgcaaaataaagggccggccgtagtgtctagctaaaaagaagttgataattgagccaatacaaatccccacgtagttataaataaacccagcaactgggccaaagaagaccacgcctcctaataaagacacgcccccaggaataatcggaataactacctgaacaatttgaatcaacacgaaaataatcggaccaacaatttgtttattagccagataagcccgcattttagcttgatcggtaaagatccccaagcggtaccaataaatcaccagcaacacgattgcgactccacaaactatagttgcaatattgattaatttacgactagccttagtcgatagatgcattttctcgccttccttcatcgcctagtagttcaattttaacaaaaatccagcccagataccgtaaacatgcaaatctaaaaaaagttttattattttagctactttgggcagatactatataataaagttaataagttattagaaaggtaggcatcttatggttgtaattaagaatgatattgtttatgacaagactaaagaattaaaaacggatatttactatcctaatgatacatcttctaataccaagattttaatcttctggcatggcggtggctggtttagaggtgataaagacagcgtcaaaaatctaggtattcgctttgctaatgcgggctttatgaccttcatccccgactactccttagcacctaaataccactttcctgctgctcatgaagatgcattgcactttgtcgactggctgttgaattctgaatacactgatcaagacgatatcaaaaacattgttcaaattggagccagcgttggcggtgaaatggcaattgaggttgctgggaaatacggtttccctactgtcacctggtctgctccagttgaatattcaaactggattaaagatcatcaagatactaaagcatccccagatgccgctaacgattttggcattaccgatcctgaaaagatcagacaatctttctacaagcacttcacattaacctacacaggtactgaagatgaggctgtattacaaaaattagacgctaagtcatttgactatagccatctcaagcaattaatgatgattaattccgcagatgagttgacaccactagctacagtattggattttgttaagttcttagctgacaaaaacttaggcgtacagctcctcgtaattcctggtcacggtcacgccatggcctatggtcccgattatgtagacgaatcgctcgattttttatatcaaactattaagagacaaaattaagtatgattaacatccaaaaattcgttcaagtcagaaaaaaactaaagttatcacaaactgagctttgccaaggcatttgtacccagtcgaccttaagtaagtttgaaaataatgggcaagtgccttcatttaaaattctcaagcagctttgtgaacggatggatattgatgttagcgatattatggacagcagtgagcacaaatatatcgcgcatatcctgtttgaagcggattttgcttttatcaattttgattacagtaaaatttttactttactttcacaaatcaaccccgaagtagacctaaaacgccaaacaaatcggattcattatcactatttgcgcggacaatatgctctaagaagtgatcgcaatcaaatgagtgcgctcttttatttcaacaatatcttgaccacccaggaattgcctgaaaatgatatttaccgcttgttggcattaaatggttgtagtcaaatctatgctaaacaaggtgaaacagagaaagccgagcactattatagtcaagtattaaagaacattatggacgtcaagatcgataatattttgactacaatgcatgccttaagtattttatgtgatgccggtgaattctatggcgaacgaaaaatgtatcgtgagtctaatgcattattgcgctatgcctataagattggcgctgagaagcacgtgattttttacatggcacgcatcctattgcggcaaggcatgaatgatattgatcagtcaaaaaagaaagcaattgctatccaacatttgcacgatgcctgtgcttttgcccgaatcaaccgcaacacgattacgctaaatcaggctaaaaaattactaaaaaaattaaatgactaagatccaatttgaaatatagtaataagagtttgttcatttgattttgcaaaaatgataaaattagtataaatgaacgctgtttaggagtttcagataggttgactttggaacgaattatcaagtttatgtttgacagtattggtagctatttatccattcgaaaaattgccaatacgttaacttcaatgggacataaaatcacaccaaatacggtagaacggtatattaatgcgttactcgacagtttgattatctatgacgtttcacgattcgatattcatggaaaagagcagctaggttcgctaaaaaaaatattacattacgcgtggtgctagttaaatcgttctagacaataagccaaattataagctaaaattgcaatttccaaccggctttgaaagcctatcagactacgtgctcgattgttctcggcattgtaataggtcagaagcgaaaagtcgctttcaattgttctgcgaatagccatcaattgatgatcattgtgctttttagctcctgtcatatttttacgatatggtgtccaaagttcgtaacccatttgttttagctgttgatgcagttctttgcctaaatagccttcgtcgccaagaagatagtaattagatggatgggtattttctatcagttcaactgtctccctggcatcatgaactgatgcctttgttacgacataatcaagaatgtaaccgtcatcgctaacaatggcatgaactttgaaaccatagaagtaaattttcttggtggccttataaccaatgttggcataaccgcgaaaaattttagcacgatagtttcgaattggttggcaaacaggtaccggaaagctgtcaatgatcaagaactgtccattcaggtcaacctttttattcatttcttgccgtatctgataaatcaattgcaatagctgacgtgaacgccgattaaaacgtgagtgtgataaacaattgaaacattcacagaatcttctttgtgattcaattcctgtcttagcttgccagataagtaaagccaaaatcagactgtccgtagttttaatttgatcaatatttcgccgatgagtaaactcagccggtgcatacaaacgataccagtgccgacaaattatcactaaatctttaaaactaacttgtaaatggtggctaaaacgcttaagcttaaggcagttcaatcagatcagactcttttctattattactatttacaagtcgagtctaacaagattggacttttttattaactaaaacgatttaactagcaccacgcgtattacattgttgatactgggcttagatatcatttgttggcaaatcaaaaaaagatcgtggacatataattgaaaatattgtttatcttgagttgcttcgtcgtggatataacgttactgtaggtagcatccctaatggtgaaattgattttgtcgcaagaaagaataacgaaattttttattatcaagtgtccgaaacagtgctagatgaaaagaccttagagcgcgaattgaaaccgtttaacaagattaatgatcattatccaaaatttctattaacaatgaatgaatttggcaaaaatgataattttaacggaataaagcaacttaatattttagattggttattagaataattaagctaagattaagaataataatttaaaaaaagaattcgaaaaatccccatttgtagtgaaaatgcctacaaaatggggatttttttagataatcttgtaaccagtaactggcttagcaggtactgtattgaaatcaaagctagcaagtttgtccagttcagtattaccatcaataattgtagtaacaccttgagcaatcatcaggttcattactttatccttgtctagatccttagtgaaggttaccaagactacaggcttatgcaaagcacgcatgaaaccaatttcaaaagcactaccatcatctacattgtccatgtcatacaagaagacgccacatgtagagttaactagaccttccaggtcattgttataagtggcaaggcgccaagtcatgctgcgaatgccaccaatttcaggattcttttcatccggatcaacaaaattttgatcaaatggaaaatgcactctgaccactgtcggattttcttctaacaaggcacgagccttatcaactcgagcacgttgatcatcattgtaaaatggagtgcctaaataaaccttagcagttgaaacttgtttgttcatgcttttgtcccttcaatgtttaaaacttacaaaataaaattatttttcattttagcatgacttttttacaactaaaagcacaaatagctgtgttttcattgtaaacgctttataatagaaacataacttattaaagctaaacataaaacttattggaggaattattttgtctagatatcaatcaattaatccatatactaacgaagaatttgcaagctatgacaattctactgccgcacaaattgacgatgccattaacttagcacacgctttatataaaaaatggcgtcatgaaaatcctgagacccgcagtcgtcaattacacaagatagcagatgctttgcgcgagcatgaagatgacttagccaaaatgatgaccctggaaatgggaaagcttttgcgcgaatcaagagaagaagttgaattatgtgcttcaatttgtgattactatgccaaaaacggggtcaaaatgttggctcctactccaatcgaatcagacttaggcaatgcctattatttgaagcaatcaactggcgttattatggcttgtgaaccatggaatttcccactttatcaagttattcgggtcttcgctcctaactttatcgtgggcaacccaatcttactgaaacacgcccacaatgttccaggttctgctgctttaaccgctaaaatcatcagacgtgctggtgctcctgaaggcagcttaattaacctttatccaacctatgatcaattaagcgatattattgccgatcctagagttcaaggcgttgcattaactggttcagaacgtggcggttcagctgttgccgaagctgctggtaaaaatttaaagaaatcaaccatggagcttggcggcaatgacgcatttatcgttttagatgatgcagatccgcaagtattgcgtaacgttttaggcgatgctagaacttataacgatggccaggtatgtacttcatccaagagaattattgttgaaaaatctcattatgaggaagtgctacatacgcttaaaaacgtcttttctaatcttcaagcgggtgacccacttgaagccggtactaccttgccaccaatgaattccgaacgtgccaaggaaaaattagaagctcaggttaaaaaggccgttgacgcaggagccgagattttttaccaatatccagagattgattctaaaggtgccttcttcagacctgtaattttgactaacatcgacaaagaaaatcctatttatgatgaagaattatttggccctgtagcagaagtctttgtagttgacgatgatgacgatgccattcagcttgcaaatgattctagctatggcttaggttcatctgttatctctaacgatatcaaacgtgctcaaaacgtggccgctcaaattgaaactggtatgactgtcatcaatggccgctggattacctctggtgaattgccatttggtggcgtgaagaagtctggctacggtcgtgaattaagtgacttaggcatgatggcctttgttaacgaacacttagtaattgatgttactaagaataatcaatagtaatttttcgataaaagaaacatactaacctagtgttggatcatgaatcgacggattcacgatctggcactttttattttgtctaaaatagaaagtgaagataaagcaaatcaagtcttcagctttttagacacttgatgtcgtaaaagaaacggactgctttaccacctattcttaagtctcttcgaagtctgtgggcacttagatgccgtgtttagaaaattagaattaataggttgataaagaggtttatcttcacagcggaggttatattatggaatcacaaattattttcggtattgatgttagcagtaaatcttccacagtttgtgtggttaatgaccggatcaaacaaggcgaatcttttagaatctctaatgattcctttggctatcaaaaactttatgagcaactgaaccaatatttgataactcctttagttgttttcgaagctactggtgtttattctctaagcctgcaagctttcttagaggattatcatattaagtatttgaagcttaatccgcttaaagcgaaaaagctaatggacaataatttacgccataataaaactgataaggtagatgcttatcgcctggctttaattcaatttaatgccccgcaaaagttgcgtgatccacagcccagagagtatcatgaacttcagaatgccagtcgctattatgaagaacttactaggagtatagttactactaaaaatcaattgcaccgcaacctccaatccactttcccacaaattgaagaaatactgtctcatccatctggcagaatttattgggcgcttgttagtcttttcccacatgctggatatgttctagaaaagaatgagacacaggtaactcaaatgcttaattctatttctggaataggacaacaaagggcacggtacttaaccacaagattatacgcttttgctagagaagcttatccttatgattccaaagatagtattatcgttagagctattcaaaggaacatttctaatttgttttcactccagcaagaacgcgactatgtaattaactacatggaaaagctggctaaagcagtaaacgctcgtgctttatccatctatttgagtatcccaggggttgctagaattacagcagtgagattagtagcagagctcggtgatctaagacggtttagcacttcagctcaaattgatgcgtttgttggcattgatccaggaaggtaccaatctggtgaaaaagacagttctcttggcattaccaagcatggcaatcatattgccagaaaaatactttatcgagttattattcaaatggagacggtaaaggctacgcagccttgccatataactgattattatgacaagaaaaaacgatcttcaaatagccaaggctataagaaaatcgccattgcatcagtccataaactgatacgcacaatgtttgctcttatcaaacatgatcaattatatgattacaacatagccaccaaaaataaaagactttagctgaaatcaaataatcaacttaagtataagcaacctatggaaaaactacaagtattcataggcttatttgtggtactttcgctttttcttaaatttaaactcttatttgctttaaccttattcgcatcattaaaacaagtaaatttattttcttaaatcattgataatacttgactttgggtagaaaatacgctggcaacttaaccagcgtatttcttttacttattattaattctatttctttttaaaaagattatatccagccaaaatcgtggtcaacacgctagccaaaatcataaagtaagctgaagctccgagagaaactgcatatgacataagttgactcgtcaattgagccagcaccccagttgaagcatgtgccgcgcttgatatttgaaaaatcatataaatcaaaaagattgattcaatcaaagaaaggaagaaggccaaagtctgactagccttagtatttttcaaaatattataaataatgaaaattgggaacaagaatagtagcaaccagacaatgtaaagaataagtgcataccatgatgtcacgccagatgaaagcaagcgccctgctaaaccgaacagtacattggaaatagacattctctgcgtgtaagccgaggcacccgagtcggtaaagagaacgattagactaactaaagccgtaaaaataactgaaatctgcacataattaaagtgatgtttgcgaacattttttatttcacgtacatgattttcaatccgaggatatttttgcacaaattctcggtttttcgctttgactttactttcacgtgcatccacccggttaaagacatcggaaccaattcggtcaatcttttgcgttaatcgcttatcaaccgtatactgctcgatcttatctttacgatcacacacaatataaagccaaaccattagggctaaaaagccagtccaccctgccgctctagaaaaactcattaggattaaaagtaagactcccaataagaagactaaggtcgcatttttcctaacccacgcaatcattctttggacagtggtgttttgcttttcaggaataaattcttcccgataggctgcacggctgataatcttttcgccttcatctggttcttcaaactttgctttttggtgctgatctgtgaaaaagtcgtctcgatatttttttagattgaagccacagtttggacaaatatcatctgtttcactaattttatggccacaatttggacaagtagtcatataaaaattcccttctttttcaatctgttagtcattattataacatgtatcagaatttgaagatcaaaacaaaaaaagaccgaatcattgcgattcggtcgaaaaaattatttactaactatttttcaacattaattggtaaaacattatcaatataaggtgaatgtccatcagcaatcaaatctgatatctttctcaacattggaaattgtatgttcctagtatcatttccaaacttttgatatgcttctggagttgcatctttatgtaataattcatatcctaatcttttgtagaaattaacactttcgtccacagattcaagataaatcagctgaacacctgtatacaatgcaatcaccatgcacatggaaaagaattccatcattagtgctctaccaattcctgttccttggtattccttgtcaattgcaaaataagcaaggtttatatatggtgtatcaactttataagtaccatcatccttcttaacattctgtgttaataaccctactgttgacgagaaaaaaccaactatctgatttttgataggatccattaatacaaaagtctttaatttctgtgtactttcgaacttcggacattccttacgaaaaaaattatctataccacgattagtggaatcaaaatgtagggctaactcttcaaaatgtggacacgtacttaacgggcataatttaaatgctctactttgattcatgcttttccttcccacgttgaattactatcccatcagcttcaacttctttttgcaacttttttatagacacacgtggtactggattggctattttgtttttgaattctttaaatgctttttcatttttaaatgttatctcagcatttctaacaatacctaccataattaccaactccttttagtgtacctattaatattatacaatcataatctgttttactattagtttcaagatttattttaacaaaaaaagaccgaatcattgcgattcggtcgaaaaactatttattaattatttttcttatttcttcttttggcgaacttattaaggtcaattccctcatatgtcaacttagtagctgctgacatagtaattggcaaaatgaagaccaagatgagcaaaccaatatccacggctaaggcaacttcaatcaaagttggaatacctgatggaatcaaggctgcaaaagtaccacccaagataattgcggctgatataacaaccgtaccaatgatagcacatgccttcaagattcttgaacttggagtagtgtatccttcagactcaagttcacgataacgagtcatcaggaagatactgtagtcaacacccaaagcgatcaacataatgaagctgaagaatggtgtgttccaagtaagcattgacttaccaagaactgctttaacaatccattgattgattgaaagtgagcagagataagcaataagtaaagtaccaagaatgtagactggttgcaataatgaacgagttacgaacatcaaggcaatgccgataccgattaacatgatggcagcagttctaaggaagtcgccactggcaactgtcttagtatcttcaatcttggaactttgaccacccatagctaccttagcattcttcaaagcagtaccttggaatgacttcttagccatagcacttaattcttgtgacttcttagtagcttcggttgcacttgggtttgaatcaaagacaacaataatttgagctgacttcttgtctgggctgaggtaaacatccattgacttcttgaacatatcgttcttcaagaattccttagggatgtagaaagtatcagcggcagctgatgaacctaaacctctgaggtaggtttcaccttgacctaaaccactattaacagtgtcaatacctgaagtcaattgtggaactttgcttgccaacttaccagcgccagcactgagttgtccagcacctgtgttaagttgactgatacctgaaataagttgtggagcttgaccagctaattggccgataccactgttaagctgaccggcaccatttgcaagtgtgccaagacctgtgttcaattgacccgcgccattgttaagtcggtttacacccgcaccaagacgactagcgcctgacgaaagtgaacctaagccactgcttaattgaccagcacctgaattaagtctttgtgcgcctgccacaccttgtgaagcagctgattgaacttgcgtcaagcctgagcttaattggttcaaagcagtagctgcacctggaagtgccttgttagaagcttgagctaatttagctacttgagtctggagagttgataattgttgaagtgatgaagttaaagcacctaattgtgagctaagtccagaaacatctatagcagcattacccgtttgagtatcagcttgtgtattactaaatgccttattaatagctgcttcagccttttgctggtcttcagtagttaagccagcactgccaatggcttgaagtgctgctcgttttgcttgtgcctgagcaccagcagctttttgactagctgctgacaattgtgctgcttgttcttgtaacttcttcaaacttgcagttaatcgtccaacttgtgaagtatctaatccactaacagcttgattcaattgttgaataccactgttaatttgtggcaaagcagtttgaagttgagcgagttgttgtttgtttgaaccactcaattgagttgaaagttgtgaactcaattgttgtaattggttaaccatttgttgggtaccactttgcaagctgctagcaccattctttaagcgatttgcaccgctaactaattggcttgcaccactttgaagtgcgtgagtaccacttgccaaacgaccagcacctgtttgtaaacgtactgcaccactttgtaattggcttgcaccattttgcaaacgactagtaccaccaactaattgttgggcaccactttgaagacgacccgtaccatcttgaagttgatctgcaccatccttcaaactattggcaccattagcaaccttgttggcacccttactcaatttgcccaaacctgaacgagcttgatcaacaccgtcgttaaccgtgtttaattgattgttgacataaagcatatcaattggttcgccgtaaggttctgtaacagatgtcgcaaatgaaacatcttttgaagcttgaagttgcttagtcacttgatcaattaacttcaaattttcttcattgtctaatctatgcttgctttgaatgtacaagtatgatggttcagccatccctttagagaagtgcttttgtactatcaacaaaccttgcttagatggaactgaatctgcaatttcatcagtgtcatcgtagttcaagtgacctgagtacattaacatgaatggcacaacaacaactgctaacacaaccaagtaaataattggatgcttcaatatggcagatgaaataccatgccataacttgtcatcactttcaccagtaaatttcttaactggccagaacattttcttaccaagcgtagccataaagaatgggttgagtgttaaaagcactaccaataaaacagcaacgccgaccgcaacaccaacagctgattggtaaacggagaatttagctaaacttaaagcagtaaaaccaattaagatggatgaacctgagtaaagaattgttttaccagcattgcgcaaagcgtcatgcatggccttatacttgtccatcccttttcctagattttctttaaacttgtcatacagcaaaatgttgtagtcggtaccgataccgaagagcacgataaccataaacacttgcgtaaagtttgaaaatgggaaattggcgcttttaactaaattagtaacaattgagaaggaagtaaggaatgaaacaccaactgtcaacaatgaaataagtggaacaattggtgacttaaatacgataaccaaaacaataaagataaagacaactgtaatggcttcagtcttcttaattccctcttgaattgaagcggagaaggcgtgctgcaagacatccgcacccgttacataagtacgaagcccttgcgttttcgcggccttgttcatttcgttataaactttttcaatcgtaccatgactcttagccacattaaattgtgctacccaagtcgtgccatcttttgattgaagtttctttcttgtagcaatattggaatctggaagtaatgaatccttgattccgtacttgcttttatcattagtgaacttatcaagcgtattattaatagcctgtttatcggcatcagttagcttgccactctttttgttaaaaacaagtgctactgcataagtgtttttctttttcgagccccaattgttctctattgactgtgccacattgctttgcacattacttggcaacgtaatgttagagtgatcattagtcagctgcgtaatgttaggcaaagcaacaacggaaataatcaatattaaaatccacgcaatcagttcaaaaacatggttcttcagaaatttctgcactttcctatttcctccctatttgttgtaaatcaggtactggttctacaagccgtaaaatcatttcatgataattacgattagattcatcttctgtttcatctccaaaagacttcgatttatccaaaaaaacgtaccctaatacggcgccaattaaagcatgaaatgaaatgacactttcttttttaaaattaagtctttcacccattttaattaaatccaagatttcttgattgatggccgcatcctttggatattcgttcaaatgatacagaatacttgataaagccggatcgcttaataaaaagtcgcgcacaacatccgcaaacttaagcaatgcatccctacctgacataccgattagatcgttcatcaactcatgacgtaagatcttaatctgtcttgcaccaactagtgatagcaattgtttgcgtcctgaaacgtaatgataaagcgactgtgagcggacatcgagcgccttagccaatgctggcaaagttgtagctgtcagtccttttttagaaattaattcagtagcttgatcaattattttatccagatcaagatttcttttctgtgccattttcatccctcctttgtcttagcatagtaaataatatacacctacagtgtgaagattacaatctacatagtgtaaataatttattttttctataaaaaaataatgaagccttctcggacttcatcatttccgttacttatgcttttttataaaccaagcattaaccgttttgcccaatttattaaaattcttgtgttgcgtgctccaaacagacatacagtaagcacgtccgttagtctgaacaattgcgacagcaaaatcatcatcaccaattgcataaatgccgccacttaagccagaaactaaacttggtcgctctttagctagggttgctaaaactcggctagcatattgccgatttaatacccgaccttgatacaagccaatcattgttttagctaaatcattagctgttgtctggccagtcatatttgagttgaccttagtttgagtggcacccatttttttagcaacttggtcaatattattaactccaatttttctagttaaggcactagctgcagttttgttacctttaagcattgcgctacgcaaataacttacaccataggtaataccaacttgaaacatcttatcacccttggctttgtcttttttgctaatcttaatcgcagttcgcgaccccatcttgcctttttgttcttgctcatacaaggcgatcagtaaaaataaccgcattgtttttcctgcgtcatgagccttattagtattaaaaactacggcaaagtgactagagttagttaaatcctgtgctactacctggaagctatcatcaatgcccataacttttttgatttgcttgactagcttctgattactgcctttttgagctttaacatggttagaatattcaatcgaattaaccttgggctccttaggcttttctaattttttaacctttggctccttggtcttctttttattcttagcgaccttgctgttatttggttcaacaatctttaactgcgcgttttccacccgctttatgtttgatgtatacaaaatgaatgcaaataaagtcacaattaaagaaccaattaatattttatgtttcattaaaacgcctcaattttagaagaaatgatgccttttcatcaaaatgactaaccaaaccattaaaacaaccatcaaaataatgattaaaacccagtcaaatgaattttttaaaattggtagactaacattcatcccataaaaaccggttaaaatagttggaatagttaataccaatgaccacacagttaagaattgcatggtatcattcaaattattgttcatcatattattactggtagctgataaagtcttagttacctgctgggaaatctgcaccatttctgcagactggcttgattcaatcaagacgtcatccaagcgttcactggcttctttagtgaagtctaatttgctgtgattcaggccatgcaacatgattaaatccgtctgaattgaacttgataaataaactaaacttttttcaatattcgaaagttccaccaaatctttattgttaatgtcatcagacaacttctgatctaggctgttacgttcaacgtcaagttgcgttacagcacgctggaagtattgtgatgaatataggaaaaagagcatcaacaactcagtaacatctttagcttcagacaaacgctcccgcatatgttcatcgttgaattcatcaaacacatagctggttgattctgtatggaaagtaaagatattttcacccactactaaaaaagtgattgggtgtgaggtaaagtgcttaatcgtgttggtcggccaaattggcacatcgtaaacaagcaagtggctcttagtatggacgtcatagtcatagtgaggacgttcgtgacggtcagaaatataagagataatgtcaggcgtaaaattaaaatcctgctgcaatctctcactgtcttcttcacttaaattattgatgtcataccacttatactttgttcttaccggaaaattttgttgtctaatcaaccagctcacctcaacttttattttattacctagtaaatggtaccatttttctcaattctttttccacaaaaaaacagaccttacggtctgctctttgaaatctaattgctatttaattttattgcttccaagcagcatcaaatttttgcttaccagtattaatttggatgttagtattttgacccttttgggctgcagcaaagatattttgcaaaatgctgttcaattggttgtatgcagcatttgaattcttagcaacaggaacactgtacaagttcttcatagcatcttgaagtttagcaggaagcttaatgctcttgttattcttgtattcactagattcgattgcactattgtttacaggaatgtaaccagtagcattagcccacttaatttggcttgacttagatactaagaacttaatgtacttaaatgcagcagctttttgttcagcgctagcgtggttaaacatgtaaatatcagtaccttgttgcatggtgtatttgccaggacgtggagcaacatcataagtaaacttgttacctacaccttgcttaacaaagccttcacctgcagaagtaccaacaaacattgcaaccttttcgttagcaaatggacctgaaaggtagtgttctgaaccagctactctgaagtaacccttcttaataccatctgcatagaagttgagaactttctttgaagttgaaccactgaagttaatcttatcagtaaagttcacgccttcgtccttcataccaagagtgtagtagttggatagtgaatcaaaaccagcacctacaactttgtggttactcttcttgtagatagtttctgaaacatccttaagttcttccatagtagttggaactttcttgatgccatatttcttaaacatggtcttgttgtaagtcaaagtttcaattgacttgttaaatgggataccgtattgagttcccttaatttttgcaccatcaagaagttcagttctaatgtcagatgcctttgcactgccccaaccaacattcttgttgttgatatatggggtcatgtttacaagcatcttgttttgagctgcgttccaaagccaacctggataagcttgagtaatagtaggtaagttatttggtgattgcaaagttgagttgatcttagcttgcaaatcattgtatgcaccttggttttcaagcttaacagtaattttagggttcttcttttcaaattcattagttaattgctttaaagtagaaccttgtactcccggcatagcgttccagaagacaactgtagtcttcttagtaatctttgatggaatcttctctgaacttgatgaagaagaattgccgctctttgaacaagcagcagtgccaactagggccaaagtagcaacggcagccatagtaagtttcttactaaacttcatttggataaatcctcccaaaaaataaaactaaacaacaatatgtttttgatttactaaagcgtgattgtttgaccacgtttaggtaaaatccgttctccatatgggttctcttccagctctggatgcaatgtgtgcaccggtactaaaacagctggttgaaccccagcaatgatttccttgagttctttttcatcggcatggcctgaacagcgcaacgccttatactcaatatcattgttagctaaagcctctacaaatggtttgtaggcaggatcaaaatcccctaatggctcagcatttgagtggatatacaaaccacccttttgcagcttatcataatcggtgacaacttgccacatgtatttatgattatctgctaaaagctcatcatagctaacttctagctctggcttaaggtcagcatagtgctcctcattaggcatgtaatagtaaggatagtcttcatccaaactttcattaatcaaatgggcacgctgagcatgtaaaacgacctttcttggtgaatcggcaatgattcgcaataatcgttcaacattagtaggataagtattaaaagtgatttggcgttcaggattagccttttgcaggcgcacgatttcttcagttagttctacttcattcttagggccagtaaactcttcactgttttcatcatgcttttcttctggccaagaaacaccagtaccttcaatgattagcatatcgctatttttagctgcctgcataaagtcccgcacccaatctggatgatagccatgcaagcgaatgtcgccagtataggcgatttgcttatccggtgtcttaactaatagaccagtagcaccgtaagcgtcatgatcactaggatatatttccaggataatatcgcccaccttaattggtttcttgtattctgccgcgatgattggacgagtataagtccgatcatgacctgcagcaggaagcaagaagtcgcccttttcattcaaggctggcaataaatgagctgtaattggacctgcataaagtggaatttctggggccaaaaagttcattgccttactgtgatccaaatgtagatgcgaaatataggccgccgcatgctcccagcggtcagtatcaattggcttacccgttaatttaggatcgtaaaaattaggcacatccccgattaatttatttttaatcagagtttgataactttcatctggcaattttaactctggccgataaacttcccccaagtcaaacaatacatgcgatttgttataggccacttcaatcatcggtccaccaattgtggttaaaccattataaaaagttactgtcgttttatcctttaaggtcattgcgcactactcctcgaataatttgctttctaaagatgaagtacaaaatcaagattggcaaaacagtcaatgtggcagcagcaagttgaagttgagtttcactacctgcatcagatgcaaatgaagttaaaccattgttcaacaatctcatgctgtcttcgttagttaccaataatggccagaggaatgaattccaaccagaaatgaaacttaataaagcaacggtgaacaagccacctttagacattggcaccaaaattttccaaatatattcccaatcactcgctccgtcaatcatcgcagctttataaattgtctgtgagattgaaccgaagtagctttgcaagtagtacatgtagaaaattgaagttaaaaatggcaataccaaaccaatataagtgttcaacaagcccattctggcaatggtattgtagttagtaaagataattgcttcaccaggcaccatcaataatgataaaagtaccatttgaacaacacctttacccttgaacttcaagttaaccatggcaaaagcaccaagcaaggcgttaaacaaactcacaattgtcgttacactagctgtgataaaagtgtttaggaagtaacgagcaaatggagcttgggcgaatactttggcataatttgaccattcaaaatgcttaggaatgattgttggtggaatagtggttgtttctctaaaactcattaatccacccaaaatcatgtagataaatggaaagacagtaatgattgcgaaaatcgctaaaataatataagcaatcaaagtgccccaacgaatcttcttcatcctttactgtcctccaatcttcttcatcatcttgcgttgcaagaatgtgacaaacataatgatgataaataagacaaccgttgcggccatcgctacacctggagtaccaacaatttggaacttgttatagatgtagaacactgcagttgtggctgagttaccaacacctgcttgtccattgaataaggcataaacagatgtataaatcttaaatgcagcaatgatattcattgttaataagaaggcgatcgttggcacaagctgcggcattgtaatacgccagaacttttcagtaccagttgcgccatacatatccgcaattgtgtagtaattagggtcaatgtttctcaaagcccccatcaagataacgatgttaaaagctaaagaagtccaaacaccaaagatgataattgtcgtcaatgacatcgctggatcatcaatccagttcggtgttggtaagtgaaccgccttgagcaagaagttaagcaaaccatagtcaccgttaaaaatataacggaatacgataccaatagcgatagttgacgtaacatatggcataaagaaagtcgtttcaaagaatgacttatgctttatcctgctgaaaataaaccaggccaacatgattgaaatagccaaagcaactggcacagaaattagggcatacaaaatagtattcttgattgcccgccaaaattctggatcactaaagatatattgataattgctgaagccactccaatttagattaattaacgagccgctttgaaaactcattacaaaggcccgcaaaattggataaatactaaagaaagtaacaaagataattgttggcgctaaaaagagccacgcctttttctgattgctcttcattagtagacacgctctccttccttagtaaacaggaatactcgatcaagacgcatcttcaaattgatattatcaccaggcttaattggtgtctcaaggttgactaatgaacgagcttgtaccccatcatgggtaaacttcaaaattcgttcacgaccgattaattcgacatcatcaaccttagctgaaactgcaccatcttcttcgactggcaaaatattttctggacgaacggataaaacgtactcgccgtcagttaagtcacgtttaaaacgatccttgtctaaatcgtccacgttaatttcaaaatctgagccagtaatcttgccgccattaacctttacattaaagttatcaatcacaggattaccaacaaaattagcaacaaagtagttatttggttcaagatagaagttttgtcctaagtcatcttgttggatcacgccattattaaagagaataatcttatcaccgattgacaaggcttcttcttgatcgtgagtaacaaacaaggtggtaatacccacacttttaactaaagcacgaatttcttcacgaatcttcaaccgtaaacgtgcatccaagttactcaatggttcatccatcagcagaatcttaggttgttgcactaaagcacgagcaatagctacacgctgctgttgaccaccagataaattgcccggcttttgatcagcaagttcggtaatctgggtcgttgccatatatttttcagcaatcttcctcgcctcatccttaggcatcttttgcttgcccacagtcagaggaaacattacattctgaagtacagtcatatgtggatataaggcatagttctggaaaacatagccgatctgacgatccttaggtgctacgttaacaactgacttgccatcaaaaaggatgtcaccgctagttggattaagcaaaccagctagcatatttaagatggttgttttaccacaaccagatgggccaagcaaacatacaaggtcacctttttttacggaaaagctaacatccttgattgcttcatgaccgttatcataaacctttttaaggttctttacttccacgaatttctcatcattcataagtttcacgcaccactatatattgatttaaatttttaaatttttctattaattctaagctaaatatacgaaaataacaaataattttcatttgaaattcggggttcaacgactttgtgaaatgcttctcagcaagtattcggcttttgttcgcatttgcttttatttttcacttatttctttttaaaaattcgggtttactaaatattgtggtaggtaccaaaaaagccatgaattagtcatggctttttgtatcataagttatctccacgttcaaattgatattttgaactattcaaggcttgacgaaccaacttgctcatcaagttcttagtctttttggtaatcacaccagcagtttcatcattagcgctagttaaatatttaataagctctctgccttccatatttttagctttttcatcaataagatcaattcggccaataccgtagctttgacaatcatcacgataggcgtttacctcataaatatattggtgatagcgtggttcaacaagcacttgtaaagttttatacaaccagtaagcactactatctgaattaaccatatgatctgccaccttatagttaagtggtgtatcctcaatattggtgtagaaaggaacatatggtgaatatgcataaaagcccatattaatccattgaattgcagccatcttggcaggaacatcatttctaatttgcaagatgcttgattcttggtttctgtctaaagcaatagaacggaacatcttttgttctttttctgaaccagatgaaaaagtgtccattggatcgtatggtgtaccgttatagtgactagttaaaaatctttgcacatcttcaacaccaatcttcttttcgggaacgcgcgtaaatggcatttcttgactagttgggtcttgttcaatgcttggattaaacaacttctgtccataccaagttcttggagtattgtaaaaagcatcagcttcatccttagtaccaaaaatatctctgaaagaaaagctaccgtcagtactattgtttaaatgattcttttctacgaattctcgaataccagctgaatacataaagttatctggatcatcaaagtcaacattttgaatcaccatgatgttaggacaaattgcgtaagaatcatcaggaacacgagccgcaacccattggtgacccgcgccagtttccagataccaaacttccttgttgtctgaaaaggcaataccgttgctttcaccggtaccatatttttcgattaattgccctaagcgcttaacaccttcacgagcagtcttcacgaatggcaaagtaatataaaccattgagtcttcgttgattccatttgctactaaaggatcatgtcctaagcagcgagcattagtagcttcagtttcagtggctgacatagcaacgttatattcgttaatgccttgctcgtcccagcgaccttctgaatcatcagcagtagggacagcagtccatttgcagccatcgccctcaaggtgcatcttaaagccgttatattttgatacataatcttcatcataatgacgggctgggtttaccacaaaaactttttcgttaatgccaccataaccgtcttcgtcacgcgcaatcatggttgatccatcgattgaagcgtccttaccaactagcattgcagtacagttatcttttttcattattgtttgtacttccttttttatttcagtaataatttttcatattattaattctactactcattaacctgcatttgccgatcaacttttgctcgaccgttattatagttaaaaacataaccgggctgcacgttatagagatagacattgaagtttaaactgccatcagttgaaacggcctgcaaattcacgccgcgggccattaactcattaccacgaaaaacagcagttgcttgataaattacacgcttattctgccgcagtgctctcctaaccttagcctcaaaaatagtctgaatcttttggttagaataagcagattgcgtaaacaaattcttaggattattttggtcccctgattgattgcgtggatcataattgccgctttgatcaattccagctgagactgaataggcaatcaagtggccccgattatagatttgggtaccgttacggtgattatagtgccagccagtcggttcaacatattgccttactcgcaagctatcattagccacattgcgcttttccaaaaaggctgtattagagcgcgatgttcgattcaatgaatcaaggttagagtaaatcacccgatttatcttccatgcgcctttgaccaaagtcgacttatcatggttgacttcggtataagcgcgactgccactcttaaaattcaaattagctaatttttgataatcagttggcgatagacctccataattggtcttggcttttgatgcatcgctaattgtattagttacatgttcatcattattgccagtaaagtcacgcaaaaactggctaccatttggatcgctgccagctttagtaaaaactccccataaaatcgcgattaagacaattaatgatgaaacaaccgttccttgtttttttcgtcttcttcgtgtcatctttttcctctaactacgagcccaatcatcaagcatgcttaagaaaaaggtctccgaaaaacgcttaatcttagcaccatttttgatcaaatcacgtgctgcattcaaatcctgattatcttttctaaagaaatcttgatcacccatgattaagtaattagtcgttgctaacactgaattgtcaacttggccgcccatattgttgatcatcttgcccgcttcagcttcgttcatatgaatattgccagacaaaacgatattcttattttgaaccggattgtgccaacctaagtcaacataatccaattcgccaatagttaggtcgatattcttaatcttgctttgtgccttttccaataaatcatcagtaaagtgctgggcaaagtcatcataaaccttgatcgtatcaagagaatcctgcaaaccgtggtgagcctcaacttgagcaattccagcccgctgcatgcagtcaagcagacggttatggcgctcgcgtggataatatgtccgcgccaaacgcaatacgtcaacgtaatcattatcaagcactggtaagccatatttttgacttaaatcatacaaaaagttcaagtcaaaattgacgttatacccaatgataacgtcatcaccaataaactcacgaaattcacgaatagcctgctcagccggaataccttccttcccaatttgctcttcagtaattccatttagcttagtaataaaagcaggaacagaattattcttggaaaacttcaccaaattagtatattgatcaacaatttgaccgttacgtaccttaaccccacctaattcagtaattcgatcgcggtaaggatataagcccgttgtttcaatatcaagcattgtataattggtcaaaaagtcaggcttttcctgtccttttttacgcaacttgtcttgcgcaccggtcacatgtaaaattccattttttatgtaaatactcattcttcacctatttaattatttaatcaaattcatcagcatctcgtgcgaattgctatcaaaacccattgctcgtttcttaagatcagctggcaaatctgcatcagctaaatcagcggcaatataatgccaattaggaaattgctgcactagctttaccattggatcaagtaattgaggactggtctcatctacgcctaattccaaaattacgacattcttgtcctcggctcccgttagaaaccaacgaaaacgcgtattagcatcggtatcagggaagaagttagcattcagcggcatatgcaattccattggactattgcagtcctcgcactttggtactaaatctgccgttacgttgccgttcttaattgccgtcataaagcgttctactacttcatggttatccttttgaccatgattaatcccgctagaacactgcattttagtccaatcaccaaaggcattgaaaattcgattttcattaaagcctgcattttcaaaaaagtgcccgaatgtactggtcgcaataaaatattttttatcacgaattagcttttttagagcaagcatcgtctcactaggctcatattgtaaggaatattcgttgattagctcactccaaaaagcccattgctcgctccaagtatcaaatctcttatctaatgcatccccaattgtatgcacatcatacttatctgcaattttgccaaattgatcatcaaagccttcttcacttaggatatctagtccctcttctttggccatgccattaccagccgttacgatcaccgtgttagcatttttcagccatttttttgctgtcactaaatctgccattttatctctttccctttgaataacctgtcaagcgtaattgtccattaatgtattctcctaagaaaacatcactgatactattataacctgcctcttcaacttgttgctgtaaccaagcttcgcttttgtgaatcaactctaagacatcaatattagcctgaccatcactaattattgggaaacgaatgttagcttcatcattttcaataatagttaattgcccgttttgctcaaagatacaattcttaatcttttcaacagagtagatacctcgactgcgcaatttaaacattaattcattagcggagattcctgctttcatacagttgccaactaacaccttgccatttttaattacttgaacaggtttaccatcgataatccctctaatccaattattgtgatcacggctgaatttcaaaataaaaacaaccaacgtccaaacaattagaactaggaaaaactgaagaattgtaatactaggattgtaaatcaagccaccaataattccacctaaaacataattctgcaactgatctaatgcagtcgtaggagccagattagacttaccaaagacattgatttgaatgattaaagttaagataccgagagcaaacttaatgaataattgtgtgtaatctagctgcattattttattacctctactttatgatcaattacatgggcttgcgttaatgtgtaagtattgcgatcatcattaaggtttaactgataatcaatatttttagaatcaatccttacgatcatgccattagttaaaaccgttgaactaactaaaacatcagaagtcgaaacattttcatctttagcaatcgatttgatgaatggcacgatttgaatcgcctgtgatttttgcgtattaagttgcacatatttttcatattgcgtaccggcaaacaaaagcaaaaataataaggcaataatacccaaatcgcgatacttggttgcaaaacggttatgtaaatatagcaaagcaaaaattatcattgctaacgccgagactgtcaagaagtttgtgtaaataatctctctcgttgattgacttttttatttatcttttaatcaaaataggattctagggtgtctcgaacttgcccaaatcctttatgaatcctgttaaagtaacggtcattgtaatccattgcctgaactccaataaaggtgtcaagcgactgctcagttggaaattctgttttaggcttggttttccgcttaagcctgttgttaaaggattcaatcatgttagttgagtaaattgaagctctaatagctggcggatagttgtaaaaggttaacagatcaggctcaacctgtctaagatctctaactacgtttttgtaggctttttcccagttttgatagaattcatgcagcacctgtacagccatttctttgtttgactgagtatgaatctgcttgaattcatccagtgctttttttcgatcgtcaacccgcattttggcactgatattacgcatgacgtgtaccaagcagcgttgaaaatgcgctttaggataggactggcagatagcctctttcatgccaactactccgtcagacaagaagagctctacctgttcaaggccgcgactcttgaagcctttgagcatttcgctccaaatctcaatattttcagtaggcgcaatacagtagtcaatcacttctttatgaccattaggtttgataccgatggcgatataaactgcttcgcgctcataagtgacccgcttaagaggaatataggtggcatcgagataaacgcagaagaacttatctgacagatgtcgctgatgatatgcctcaactttgggaatcatttctttagaaatattggaaaccatagctggagaataatagccgccatacattttctcaatcaaatcagcgatttctcgggttgtgacgcccttggaatagagcttgataacagtttgctctaaaacatcagtatgccttttataatctggcatagtgtgttgatgaaactcaacgtttctgtctctaggaactttgatttctatttgtccgaattgcgtatcaaccttgcggtaataagcaccatttctagagttgccagtattccagccatttctggcatagggatcatagcccagaaaggcagtcaattcagcttctagcaagttattaacagcctgttgtagttctttgcgcaataaatcatttattttgtctggattgaatagagcttgagcaaaatctttggtaaaatcattcatgaaggagttcttctttctgtatgtgtttttttgttcaaaccaatcatacgagaaaggaactcctttttctaatgtttaaagaaataaatttaaggaatcattcatccttacacaaactattttacagtctcctaacgccgccaccaacatcaaagcatataatactgcctgattagtattctggttattttgaatatatttcattgtataaaaggtcatgctctacctcacccttcatatttttctttcattctaacacagaaaaaaagtagcactttcgtactacttttactagaaattattcacttttcactattattaattatttttgaatttcttttaatccagctttgcgacggcccatgttaaaccatggtgaaacagtgaaggctaacacatcattaattacatagatcaatgaattaattgccatggctaagtttgcatcaccttgagcataagttacgcccaaaagaatcaactggaagacgccactagcagtccaccaaaagtattgattgttgtaacgcataaagcacatgatcccagcagttaatgaaatagcaaaactaatagcatcaatccaaggacgaggatcattggtaaatttaccaatcaaaaagccggatacaacataaacaagtaaagtaccaacaatagcaacaagccattcctttgaaccgaattttcttaagtgattcttagtgtcatcattccatgatctaacagcaataataactggtaaatctaaagttgcaatataagcaatctgttcaaaaatggaaagataattcttagctgaccaacctgcatagataaaacaagcagctgaaatcaaccccaaccaaccattaattgctttagtagcgttaattgccaatacacaaagtgtacccaaaagcgtaccaataaaagtaatcaaagttacgcttgtaattttgccttgaatcagcaaagctaattgaaatccaaacgcaaaaaaccataaacagtaattttgaactggccagcctttcaattgattaaatagccaaacaaaataattttcgtgttttctttccattgtactgagacgtaaaaagtagacaattaaaatattggattaatagaggcttgacttcgatactctttcggggttaagccttttaatctgctctttatcctttcgttgttatagtattcgatatattcctcgattgcttgagttaattcttgaagattatgatacttgtattcttgatcatagaacatttcagttttgagcaggccaaagaagttctccattagcccatcatccatggagttgccctttctggacatgctttgagtaataccatggagttttaaagctcgctgataacgagggctttgatactgacagccctgatcagtatgaaaaatgcagttattaagagctgtttctttggcaaaagccttgtcaagcattgtcattactaaatccatatctggatgtttggagatagtataagaaactatatcgccaccgcagccgtctagaataggcgataagtaaagcttttcattattaagatgaaattcagtgatatcagtataccattttgtgttaggcagggctgcgaagaaatcacgatgaattaaatttggagctattttgccaatagtacctttatagcttgaatatttgcgcttattgcgcctgatgcctttaagacctaatttatgcatccaatagcgaacggttttctccgtaactttccagccctctctgattaactgcaaagctactctgcgatatccatagcggccttgatgatgattaaaaatctcatggattctagcaataagctttgaccgtttaggcttggcgggctgtcgtttgataatcttgtagtatgagcttctggcaattataggtagctcagggtgctctgcaatcgcagctaatacataatttaaactaactttgaattcttgccttagatccgtaatcaccctagctatttcttctgatcttcttggtccaaggcacttagtttttttacgtattcgttcacaatacgcaatcgcaagttttcttctttcagctgctggatctctttctccagttccttgcgagatttctgcttttctttggtcacgggcagggcgtcctttctgtttgataatgacattatacccgtttttcttatattctctaatccaattgttaagcatgccaatacttttaaaccccagttccaaagacagctgtaagtatggtttattgccaaagattgcttgttcaatagttcgctgcttaaactctttggaatagctttggtttttagtagttaaaatttctattccatgcatatcaattaatctaagcatatagtctaaattagctagattcattctgtacgctttagccaattgactgattgagatattttcatctttccatttatgataaatttctattttttgttctttattaaatttagacatagtaaacattctaagctaaatagtgaattagttatccgacgggataattgattcactatttttattcttttgtagaattaaagtagtggtaaaacgatatgccctgaggtctttagacacttgatgtcgcataataaactggcagttttacttaagttttcaatagtctcttcgaagaatgtggacactagatgtcgagtttagaaaattagatctgatttcttaagtaaatacgttttactactaagttttggaggtttttattatgcaagttacttttggaattgatgtaagcaagtctacttctactgtttgtgaactaattggtgaaagcaaaaatgaactaaccattactaataatcgtcctggttttattcaattgcttcatgaattaaccgctttttctaaacatccgcaaattatttttgaagctaccggtgtttattcacgcagactgcaggcttttcttgaagactacggctatgaatatgttgttattaatccgcttaaagccaaaaaagagatgaatatggggctacgctacaacaagaccgataaaactgatgcttatcatttagctttaattcaaagactttatcgccatccggttaatcaaagcgaatcccaaacttataagcagcttaatgctttgagccgcttctatgaccagctgacaagtgacttggtaatagctaaaaatcgacttcaccaagctctacaatcgacttttcctgaaattgaaaatttattttcttctgctaaaggtaaaaattactggcaaatagttgtgcgatatcctcattgtgacttagtaagaagagaagataaaaaacagcttattaactggttaatgagcttaaaggggattgcttttaaacacgctctaaggactgcagataaattaattgaattagcttatcaagcttatccagttgtatcttgctctagcatagaagtcgagcaagtgcagtattatgcacacagattgcttaatttaagtgatcaaagagaaaatttaatcgcaaaaatggttaagttagcgaagtctttgcctaatcatgatttagaaaacctagaaagcattccaggctttgcacagaccactgctgtcagagttttagcagagttaggagatttacgcagatttagtaatcctaataaaatcaatgcttttatcggaattgatccaggcagatatcagtcaggagaaatggactctaatttaagtattactaaacatggcaatgcagtcgcacgtaagttgctttatcgagctattggacaaattgataatgcagctaagacaaatccgtgtcatatagcagattattatgaaagcaaaaagctatcctctcaaaccaaagggttcaaaaagatagctattgcttcaattcataaactaatcagaaccatttatgccctgattatcaatgatcaaccatatgattacaacgtagccacacataatcaaaaagactttagtcgtaattaattgatcaagtacattataacgctaagcccaaaaatcagatatggatctgggcttatttgtcgtgtctaactaaaaaaataaatcgacactaaaagatgtttaagttgaaatttaaacaaaaaatgaagccaaacttcttattatgcttgactttacgtagaaaaagacctaaaagtgtctaacttttaggtctcagttcacatcctattcaacattccccttttttattttaggttgcaaaatacaagatcttgtgccttatccgtgctatgtaaaaaaacatcgatatctagtatagtggaccattaattaaatacaagaattgacatttttaatttttgcgttaataacatatttctatttccgtttatcaagcaaacatttattaattttttctaaacagcaaaaaaattttgttccttttagtgacacagtgtcatatgatatatacgtgattattaatttatatttttatggaggtacactcatgtttaaaactaagaaaacgcaatttgctatccgaaaattagcacaaggcgcctcagcagttttactttgcttcggcatattgggcggagcaagtgcacctatcgttccagctgcaactacagatgacccaacaaaaacagtcactgaaagtacaattaatagtgagaatacttctttcaatattgaaaccaccaccaatgcatctgataaattcgcttccatcagcaaaaatggggggggtacaacggtagtgccaaattctgctgagccagtttctccggatcagtccattacagaaaatgataatcagcaagaaaaaactactgtagagaattctactgagatatctgagcctgtcaaagacatcaataagtttgataatgatgccaatgttgataaagacgaaacaatcactgtaaaaaagccaacaattaatgtcgacactgaaaaggtagaacaaggcgatgaaacagagaaaagtaaactcgaagaaattaaaaagtatattgaggacgtagccgcaaaacatccattaggcattgccggaattttccacctttttggtaacgaaatagatggatctgctcatattgcaggaaatgtcgcaacagacaaattaagtgctggcaacttcggtactatccaagatgccactagtaacttgactacttgtgatattcattacatcggcagtattgatcatttgaatcagattgatggcgaaaataaactagttatttttggtccagatgttgaatataaatcatacgaaaatggtagttccattcaggtaaaaataaatggaaattggcaaaaagtaggaattccatacaacaaaactatcagagctgaccaaattctagatattcaaggcgaactagataaattaagcgataaatcagacgaatgggctaagcaaacgcaaaccgaaggcgtaattgctgatttcaaggagggtaaatagttggatcgacgtttctaatgctatcaaggatggcagcaaagatcctatttatgtaactattgatgcaaaatacctttcaggcaataacaagcatgaaattgctattaaaggcatccctgcagacgcagaaacaccaatcatcatcctaaatgtaactaatgttcaaaatggcgatttaaccgttagcacaagacttgttttggattattcagaccaaactagcatcaatggcgtaagtgaaaaaccatctcaacttaataagttattatggaattttggaacagatgttaaaaatttaactattgaaggagacttccatttaggtagtattttagctactaacgcacatattaccgctaacaaaaatgttgacggtaatatcattggtaacaaaatcactattaaaggtgaaactcaccgttgggacctaactccgccattagtagaagttgaaactccgccggaggatccaaaagatccacctaaagaccccgaaaagccagagaatccacctaaggatcctgaacctactcctgagcctgaaccggaactaaagcctgagcctactcctgatcctgaagaagagagtactcccccattaccagaagaagtaattcctccaactgataatgaaaattcctctgacttcaaggaagaggacactgctcctctaccagaatctgttgtagaaaaacaagttaaaaagaatcatccatccccttcaactactgaagaaaatattgcacctcatgctgcgactatcccaacctcaactataactgaaaaagaaacagttttacctcaaaccggtgaaagccaagacaagctaatgacgattggactcatcactactagcgttgcttcattgtttgcagtattaggcacagtaatcaaaaaaagaaattaattaaaaatgattcaattcaagccatttttattcttaaaataatctagaattaagtgaggattaaaccatgttaaaaaatagactaaaaatattccaacaaattcttcctactaaggcaactaacactccaaaataccaattgcctatcaactattacgatcctgaaggcagcatggttggcacttattctggaattaacttggcggcaaatgaaactatcactcaccaccagctcaaaagatttatcaacatccatcttcccgaaaactacgaagtttttccttactttgcttatcctaaggagaatatcacctgtgaaaatctgcctgatgaaataatgatcacaatcagattatctaattaaaaaaggcgactcgattgagtcgcttttttcattgcaattgatattaatgttgcgaagcaccagttgtagtatctggttcttcgtgcttttcttctttaacttctgcagccttagttgaagcaccagttgcggcgtctggatcagaatttctacggtaagttgcaccagtagttgcatcatcatctactaccaatttttgaccagtagtctcacagaagtacttaactaatggatataagtctttgacccattcataaataccagcatagttaccttggtcgtcttctacacgcttataatagtccacaaccaacttcttcaaattgcctgttggtattggcatataaacatcatcatgacctgcttccttagtccgcaaagcatgaacaacttttttaacattcggaataacgtcacgaacatctgggtgaactgcgcgcatcgtatcacccacttgatctggcgtagctagcattttcttgttaggatcagttggacggttataccacaagaattggttattatcatcaacaaatgtcattttaccaatggtatttctcagcatccaattaagttggttaacagttaacagacctgcatcaagtttgacataatcgtcaccctccgcagcatgaacttttttagctgctttatctagccaatcaggatcatttttatcgattccctcaactgtatacttagacttaccctttgcatcgaaatcttcttttaagtattcatcggcattcatatctttaagccattttggttcagccatagtaagaccccctcgtatgaactttgttaatctaattatataatgtaagtggtttcaattcaacaattttaatatatttatataatatttttactagctggattatatattattttacgcgtggtgctagttaaatctttctagacaataagccaaattataagctaaaattgcaatttccaaccggctttgaaagcctatcagactacgtgctcgattgttctcggcattgtaataggtcagaagcgaaaagtcgctttcaattgttctgcgaatagccatcaattgatgatcattgtgctttttagctcctgtcatatttttacgatatggtgtccaaagttcataacccatttgttttagctgttgatgcagttctttgcctaaatagccttcgtcgccaagaagatagtaattagatggatgggtattttccagcagttcaactgtctccctggcatcatgaactgatgcttttgttacgacataatcaagaatgtaaccgtcatcgctaacaatgacatgaactttgaaaccatagaagtaaattttcttggtggccttataaccaatgttggcataaccgcgaaaaattttagcacgatagttgcgaattggttggcaaacaggtaccggaaagctgtcaatgatcaagaaatgtccattcaggtcaacctttttattcatttcttgccgtatctgataaatcaattgcaatagctgacgtgaacgccgattaaaacgtgagtgtgataaacaattgaaacattcacagaatcttctttgtgattcaattcctgtcttagcttgccagataagtaaagccaaaatcagactgtccgtagttttaatttgatcaatatttcgccgatgagtaaactcagccggtgcatacaaacgataccagtgccgacaaattatcactaaatctttaaaactaacttgtaaatggtggctaaaacgcttaagcttaaggcagttcaatcagatcagactcttttctattattactatttacaagtcgagtctaacaagattggacttttttattaactaaaacgatttaactagcaccctgcgtattattttatataaaaaaagctgatcaacgagcaactctttacatctttgtctcaattgtatgagtgtccaaatgaatgatcacgtcaaacatcgctttttcttctggtgaaatcttatgagccacctcaataacagcaatacgtggattcttcaacagcgtcttatgaatgcctaacgacaagttcgggtcaagcgcacttgtcgcttcatcagccagcaaaatcggccgatctgataaaagcgcgcgagcaatttctactctttgaatttgtccacccgacaagccactgccgttttcacctacagccttgtctagaccctgttcctttaccaattcatctagaccagcctcatgaataacttctttcaaatgctcgtcactcactttacgtcctaacgtaatgttgaaacgcaacgtatcatcaaacatgaatggcttttggttaacataggaaaaataattatgggcagcatcccaatttcccgttacatccgtaccattgatcaaaattttaccgtctttgggctttctcaaacctaatagcaagcgaagcaaggtggtcttgccccaaccacttggcgccatcaatagaactttttcacccggcttaactgttaagttcacattctcaaagatgcgtttgtgatcactacctgtaacataagataattgttcaacctccataccatcaaaatgatcgatcttctgcttatcatctttcagcacgtgatgcaaagcgcgctgggtcttttcccacattggcacagtcgacttgacttggttaaattcgttaaaaagagtcacgattggcgtgataaagttcaaggccaaatcgaccatcattactaatgtacccacctttaaatttccctgcagcatcataataccgccaatagtacatggtacgatgaagcaaaacaattcagcagctgaataaattaattctagtgcccaagcttgagtcaacgtcatattacgcagagcgttctccattgcctgggccgcaccagctgctcgtgtaacgatgttggtgcgcacgttataaagcttggtagcctgtgccccatttaatgaatcggacacattttgcgtatagttagcgttagtcgttgcccaaatcttggacttacgtgtaatgataggactagtaatcatttgaactaatgctggcgcaagcgtagcaatcaaaaatactagggtcatctgccatgaactataaaaagcaaaagtaattgccccgaaaaacgacaaaccttggaaaatcatatccaattgtgccgttatccgattagtttcaatctgttttaaatcgttggtcatcagtgataaaccgctcttgatatcaggctcaccttgatcaaccaaataacgcaagttagtgcgcttaaaggtcatattcacgtcacgaataatgcccatctttaccgtttcatagacaaagttactggccataaaacacatctgacctaaggcagtcaaagcagccaggcgaatcaaatgcagataatcatgcgatcctgacgaagcaacattcaacataatttgtaccatataagctacaaagacgatgttgcaggccttgattgcggccaaaatggtatagctaataatttggctttttttagcgtacttcaggctcattaatttctccttttctatcccgttagaaacattatacccgctagcttgtctttttctcaattagatacgataattagagtaatcattttaatttttaatgaaaagcagaaaggaacttttaatgaagactggtactaaaattattactttagacaacggttatcacttatggaccaacacccaaggtgaaggcgacattcatcttctagctttgcatggtggtcctggcggcaatcacgaatattgggaagacactgcagaacaattgaaaaagcaaggcttgaacgtgcaagttactatgtacgatcaactcggttcactttattcagatcagcctgactactctgatcctgaaattgccaagaaatatttaacctacgaatatttcttagatgaggttgacgaagtccgtgaaaagttaggacttgataacatttatttaatcggccaaagctggggtggcctattagttcaagaatacgccgttaaatatggtcaacacttgaaaggtgcaattatctcctcaatggttgatgaaatcgatgagtacgttgcttcagttaacagaagacgccaagaggttttaccacaaaccgaaatcgacttcatgcacgaatgcgaaaagaacaacgactatgataatcaacgctatcaagatgacgtacaaattttaaacattaatttcgttgaccgaaagcaaccatctaagctttaccacttaaaagacattggtggaaccgctgtttacaatgctttccaaggcgacaatgaattcgtaattactggtaaattaaaagactggcatttcagagatcaattacacaagatcaaggtgccaaccctattaacctttggtgaaaacgaaactatgccaatttcaactgctaagattatgcaaaagaagatccctaactcacgcttagtaactacacctgacggtggtcaccaccacatggttgacaaccctgacgtatattataagcacttagctgactttattcgtgaagtagaaaatggtacatttaagggcgaaaattaattaacagatattcaggctggaatcgatttccggccttttatttttaaggaaaatgatatggatgaaaaagatgtcaaaattctgctagttgaggatgaagaaagcgtcgctagcttcgtcaaaactgaattagaatttgaggattaccaagttgtttgggctgaagacggcaaaaaagcattagacctttttactcaagaaaagccaactttaattttgcttgattggatgttgccagtatatgatggcatgaccgtgttacggcgaatccgcaagcaaagtgatgtccctattattatgcttaccgccaaaaattctgcctctgatataagctctgctcttgatcagggactagacgactacctcaccaaaccatttgaaatcgaggaattgctggcacgaattcgggtagtcttgcgaagactggaaaaaatgcggcagcaaaatgacgtccctgatacttccctagaatttggcccattaaaaattgatctgcttaagcacgaattttactgtgacaccgagcaaatttatcttactcctaaggaatttgccttaatcactgaactaatgcgggaccccgaaaaagtcaaaagtcgtgacgagttgcttgatacagtctggggatatgactttgttggtcaaaccaatactgttgatgtttatattcgaactattcgcaacaagataggcaatccctacaaaaagatcattaaaaccatgcgcggcttgggctattgtttgagaaaattagatgataatcatgaaaaaagctgatcctcaaacaactacgcaacaattaacccgtttattcgttaggctatttgtcgctattttaattctggtcaatttggcttttctaattatttcatcggcctatatttattaccaagctgaacggcaaagtgaacaagttgttgaagcagtaaaagaaaatcttgattcaaaatatgactggtcggctatgctggatgcttatttggcaaaacaagacgatgatgccatcattttaaccacccctcaaggcaaaagttattactctgaaaatgctcacgagacctttaaacaaattaatcgccaaaatcattatcaaaacatggtctattccaataagcatatttacttcttacggacggaaaactcgcatgactttaaaatcaaggttgcattaaacattgatcgcttatttcatttaattatttggctatttgggacaatgattgtcatcaacttaatcgctattctgctgagcatcccccttattcgccgttttgcccacaaatggagtcgtccaattcaggtaatgaataatgaaattcaagaaatccagcaaggtgcttcaactgagcaaatcacagtgccgcaacaaccattagagattcgaaaattagcccagtcttttaacaatctgctagcttttcaaaaacaggccttacagcgtgagcaacaattcgtcagtgatgcttcacatgaactcaaaacaccaatcgccgcaattcgaggacacgttaatttaatcagacgccatggtcaagccaaaccagaaatcatccctaagtcactggattatatcgatactgaatcaaaaaagatggaaatattagtcaacgatttactcaccttaggaagaatcgaacgcaatactgaagtcgtcaaaattgatttggtaagaattattaatgaagtagtgtcagaaatacagtcagtttatccacaaaaaatacagactgacatgccacaagtattgaaatatcgtattaattcactagattttcacaacattgtgcacaacttagtggaaaatgcggcaaaatattctcctcaagacagcactattgtagttaaattagctaaaaataaaggacaggtctctttcacagttgcagacaacggaatgggcattgcgccagaaaatcgcgagaagatctttcaacgttttttccgtgaagacacgtcccactccaataaagttaaaggatctggcctagggttagcaattgtcaaagctgaagctgataagtatcatggtcaaattaaagttacggataatagtcctcagggaacaatttttacagtttcttttcctacagaaaaatgaagaaatcttcatttaaactctattaaatcttagttttttaaagctgcttagctagtaagataaatatatcaagttaaagcaaaacaaaaaattatcaatagtttaaaggagaacatattatgaagactattaacttaaagaaaattactattactggcgtagcattactcggcttaggaactgctgcaattaccgcaactaatttagctactgaacctaacgtagttcaagctgcttcaagcaaaattaaggtttcacaaaattcagctgttaaaaagtttaaggcaaaattcaaggcagctaaagtcgaatcaatcagcttagataaagaaaaaggccgttacgtttacgagatcgaaggcttcaattcaacgagagaatacgaaatgaaaattaatgccgcaactggcaaagttatctcatcccactccgaaagacttgatcgagacgagcgtaataaaaaagcattaaatctcagcaaaactatttctcgctcaactgctactaaaattgctcaaaaaagagtatctggcaaggcagttgaatggtcattagatcgtgaaggttcaaagaatgtttgggaagttaccatcagcaagaacggccaaaagagcgaagtaaaaattaacgcaattactaaaaaagtaatcagtgttgaacgggactaattgagaaaagaaggtatagaatagatgaaatttactaaactgacaagtattgcattattaagcgcagctttattaacaggaactgtagcatgttcaaaacaagataattcaactgctaaaactactacccaaaagagtgttacttcatcaaaggttacacataattctgaatcagcaatgagcaaacaaactcaaaaagataatattcaaatcaaattaagccagcaagaagccattgataaattccatcaacaatttagtggcaaacagcttaaaagcattgaattaaatcgtgaaggcaaacattacctttatgaaattgaaggattcgattcaaacaatgaatattctgttaacatcaacgcagaaactggtcaaattggacatgttcattcagaaaagttagatcatgatgatcgaaaccaaaaagctctagatttcaagggcaccattagccgcgacgatgctagtcgtatcgcagaagagcacattaaaggcactagcgaagaatggaaactagagcaagacgaagacactggtaaaacatactgggaagttaaggttaaaaatggtcatcaagaaaccgaagttaaaattaacgctcacaccaaagaagttatttcaactgaacatgatgattaataagattaagaacataaagaaagccgcaacattattctcgaagttgcggctttttattttgtctaatttttggataacttttttaccaataaccaatcagtttgaggatcgctaccaacttggaaagtatgctggctcactttttcaaatccatgacgcttataaaaatattgtgccggaatgttcttttcataaacgcctaaccacatgtaatctttgccttcttctcgtgctgtcttttctgcaaaatcaaacaaaacattgcccaacccgcgatgttgaaaattagtacgcagataaattcgttccacttctagagcattatcacgtaactgctcagtctgagcatccccaacattgatttttaaataaccagcaatttttcctttaaccattaaaaagtaaaaacgactattaggattttcaatctctctaatcaacttttccgtctgataatcttcctctaaaaagcgtttcatgtcatctggtgcagtataaggatcaaaagtcgttttaaaagtttcacgtgaaactttctgtaattctttcacatccgctgttgtaattgctttaatctcgtacttcatcaatatttcctctttccaccgttcttaaccaggtgccaattttcactggcattcttttctacaatttgtaacaaagcagctaattctgttctctgtttttgatctagtcctgtcaaaactatttcatttgaataagcattttctttttctattcgagcagctaatttatctcctaattctgtcacaaacaaatgcttaatctttttattctgctggtcattttctttcctaatcagctgattttgttccagttttttaatgctacgagctgccgtcgtccgatcaacattaagcatccctgctagatggtcagaaataattcccggattttctttaatgcgggctaaatacaggtactgacctcgattcaattgcatctctttaaattcaatattagcaatcgaatcaagtgctcgcgcaatagtgccaatttgacgcaaaatatcttctttcatgtttttcacctaaaaactattatatttaattttgttgtaattgcaacaataaaatataaaaactaaaaaagggatcgctccctttagttaattcatcaatttttctttagttcatttagatcgactacctgatcagctaactgcttaacttcatctcttaagtggtgagttaccataattacggttttatctttttgcgtcaaaatcaatctttctaattgtacgctagaagctttgtctaaggcagaagtagcttcatctaacagataaattggtgtatcacgcagcaatgcacgtgcaaaagcaacacgctgtttttgcccaccggacaactgtttaccttggtcagctaaaacagtatccatgccatcaggcaacttagcaattagatcctctaatccacattctttgatcacttcagaaatttttgcttttgaaacttggcgtcccaaagttaaattccaccctagagaagcagtaaaaatatatggatcttgctgcaaatatgtaatctgatcatgcaaatccttatctgaaatctggttatattccacatcagaaatttcaattttcccctgataatctctaagtaagccagaaatcaaattcagcagagtcccccatcagaatatatttatttttcagtttaaaatttaaattcaaattctcaaagataggcttatcttgtccagaatactgataagaaactttatccaattctagattgcttagtttaaaatcagcaggcaaagctccatcaacagttttaagcggtatagtcttaaatttttctataattggtttaactgatttgaattcttgccaattaaaactaatcccacttaattcagcgaaaattgtactggcaaaaaattgtgccccactgatggtcccgactggcgttaattgatgcaaaatcaaccagcctgtttgccctaaaatgataacttgactgataaaggctagaccattggtaatcgcctgagttatcccggctgttttactataatttagcgcatgttttttaacatcatcagaagcgccattgatctttttgacgattgtttgcggtaaattggcaagaaataaggtattgaagccattcaacacatcattaattgaattaaccaaacgttcattggcatgggtatattctaatgaccttttggccaaaattttagaaaacaaattgggaaccactcccataataattgtcaaaataatcacagtgaccacaagactgacattgaagtacgccaaagtgagcataccgaaaacaatttcactgatttgtctaatgatcatcatgaaatcctcgacaccaaagttattaatggttgtaatgtcattggtcagccaagaattgtaagtagctaccgtttgttgatgaaagcctgaataactcgtctgtgatagatcttgcgcaatgtcatttctaattaatttatccacattttgtgccaaacgggtttgctcaacattgactagacagttaacaatcgcgtaaaaaatataggcaccgcccattaaggcaacccacatgaaaaaacgctcagcttttaattttgcaactgcacttaaagcattagcgctagatattccggctagtgtcaaaaagcctgcattaatgactattaaaaatgtaacaaataaaaattcccactttaatcttttaaaatattgcagtaattccattgattctccttatgagactgtaaaatagtttgtgtaaggatgaatgattccttaaatttatttctttaaacattagaaaaaggagttcctttctcgtatgattggtttgaacaaaaaaacacatacagaaagaagaactccttcatgaatgattttaccaaagattttgctcaagctctattcaatccagacaaaataaatgatttattgcgcaaagagctacaacaggctgttaataacttgttagaagctgaattgactgcctttctgggctatgatccctatgccagaaatggctggaatactggcaactctagaaatggtgcttatttccgcaaagttgatacgcaatttggcccaattgaagtgcaagtgcctcgggatcgcaacggtcaatttcatcagcacacgctgcctggctacaagcagcactcggatatcttggaaagcatgattatcaagctttactccaagggcgtgaccaccagggaaatagccgatctaattgaaaagatgtatggcagccattacagtccagctcaggtatcaaatatttccaagcagatgattccaaaggttgaggcttaccacaaacgcaagctaagcgacaagtttttctgcgtctatttggatgcgacataccttcctttgcgccgagaaacatttgagcgtgaagcagtctatattgccattggcatcaagcctaatgggcacaaggaggtcattgactactgcattgcgcctagcgagaacattgaagtctggacagatatgcttcaaaacatgaaatcccgaggcttaaagcaagttgagctttttctttctgatggtgttgttggcatgaaaacagccttggccaggacttatcctaaagctcattttcaacgctgtttggttcatgtcatgcgcaatatctgcgctaaagtacgcgtcgacgatcgtgaaaagatcatgaacgaattcaaacaggtgcatcaacagacaaacaaagaagaagccacagctgtcctgcatgacttctataccaaatggggcaaggtttacagccatgttatcagaagcttgaaagacatagaaccagatctgctggtcttttataactatcccaagcagatcagagcttcaatttattcgactaacatgattgaatcatttaacaatgtgatcaagcgcaaagctaagcctaaggcagagtttccaactgaacagtcgcttgatgcttttattggcattcaggcaatgagctacaatgaccgttatttcaatcgaattcataaaggctttggtcaggttcaggacaccttagaatcctactttgattaaataaataattaaaaaatcaatttacgagaaagatctatttacacaaaagatttgacagtttcctccttatattaaaaataattaaattaataatactatatttatgtatttgttcaatattttttaatactttacttaaattactgcaaaattaaaagggatcgctcccttttaattagtctacataagcatatttatatgaccattgcgtaccagcagtattatgaatgatgccgtgaactcgcttgttttgcaagtaagctgtggtctgttgataaatcggtgtaatagcctgattactatttacaatcttagctgccgaaatcagatcattccagcgtatgtcaggattattggcgtcttgattgccagcttttttaaccaaattatcgtactcagaatttgaccacttaccgtaattgtaagacgtacctgtcattggaatttgcataaatgtcatcgggtcgttgaagtcgccaccccaatgagagagataaatgtcaaagttgccttgatgtgctcgactggtggttgacttatcaggaatattggtaatatttatcttgattcccttcaattctttggtccattgtgactgcaaatattgggtcaattgatcactgtctgcttcatcatttgaagataaaacatcaaaagtcaaactcttttggccaatctcctgtaatcccttttgccaatatttcttggctagagctggattataatcaactgtatttttcactgcttgttctttagcaaaatctatacctgttttaggatttgcagccaaatcattggcaacaaagccttttggcagagttgagccattgcctaaaacctttttagtcacaatatcacgatcaattgataatgataaagccaagcgaatatttttattattcaaggcctttctattaactgcatttttatccttaaaattataaagcaagaaacgcactaacgaatatggatattgagtaaagtcattattgctcttcaagtttttaacttgctcacttgaaagtggagttaaatccaatttgccctgttgatacaactgataaccagtattgttagacttaactacttgatagtgaatcttgttcaacttgactaccttcttgtcccagtaatcattattcttaacaaatgaccaggtatcattagttccattccatcctttaatcttgaaaggacctgagtagacttggtactgagccttggttgcgtatctattgccatactttttcacaactttttcgttttgcggcccaaatagtggataagccatcaatactctaaagtaagcgatcgggcgatttaacttaaccactaccgtctttttatccggtgcagaaattcctaatgcattaggtgatttctttcctgcaatgattgcgtcagcattcttcacgccactaaaaagataggcatacggagaagcggtcttaggattcaagcttcttttccaagaataaacaaagtcctgcgctacaatcggatcaccattggaccacttagaatcacgtatcttaaacgtccaggtcttaccatctttagatacggtcccagttttagctaagccggctgttggcttaccatttttaccaagacgataaaaactttcgaatacattgccagtttgaccaaatccggtagacttactgatatcaatagtatctagtggagctgtggtgcttaaatttaaagtgccactttgagctgccgacttactactgctattgccattaccacatgctgcaagaagcattcctaatgaaatagtaacgactcctgctaaaactccctttagtttcgacataaattttcctttctcaaacaaaaaaatgggatgtactccaacacggaatacatcccattaagaaccacaactttttaactagttaatcagtaatagtcttaagatgaatcaccacatcagagcatgtcaaataaatgctgtttgtacaacaacattcagtgtattgacattgcatttgacgcttaaacatgtgattcatcatccttcttacttttgataagaataatcataatttattcgatcacgattgtcaacaaaaatctattgtataattatagaaaaatatttggagaaatttttatggaaattataaaatatggtccttacactcttttcacacttattagaacaatcctaacatttatcgtggctattgagcatatcggtatctgtttcttagaaatgtttggtaaacctgaacaacaagctaaggcttttgacatggatatcaattttgttaaacaagaagctgctcaagtttcactagctaaccaaggcatctacaatggtatgttaggtgtaattttgatcattgctttctttattttccctatccctattctttttaacgtatggaaattaattctaagtttaattgtcgtagtagcaatttacggcggattcactgcaactaagaaaatctttttagtacaaatgctacccgcacttttagcattaatttttcttttcatttaaaaatattgcatttttgtagcaaaaaacataagaaaattcaaagctcctagtgataagctgtcaccttgtgattatgtaatatataatatcagtaaacatatagaacataataacgaggtggaattcatgagaaaattttttatcattatcagcagcattattactgggttacttattgggataattggggcaacgatctatctaaatagtcaatcgtcaaaggtaagtaactttaccattcgaactactaatttaacagctcaaccgaaaatgatcagctattctagcaataacctgccacagattaatctctcacaggattccgccgttcagaaattcaaatcattatatacacatgcagtaggtcaactaccttagactgaagtctagggtttagtggcttgttagcttgcgctaaccagaacaccaacttgcttagatacggatttgacttaccagcagtaatcttttgactattgccgatagaggtcgtctaattaccaaagccttttaagtccgcgagttgctagcggactgcagcttttctaggctgcttcttttattttaggattctgccacttgcctaatcctttttctaagatgttcacggccgcattccaatcacgaatatgatgcatctgacagattgggcaagtccattcccgatccttaagggttaatttcttataaccgttttggcccataatactgccacattgatggcatctttgggtggtgtacttaggatcaattgttagaaattctttgccatatagatatgccttataagccagcatgttcaggaaactacgccaaccaacatcagaaatagcttgagacaaggcatgattcttaagcaggtttttgctccttaattcctcggcaactactaaatcgtggtttttgattaatgcagttgagagaacttgtaagaagtcttcacgctgtctgcgaatcttgtcgtgcagtctggcaactgataagcgctgcttttgatagttttttgctagccgcaaattgcgtccttcttttttagcccggcgctgcctgcgagataatactcgttgagcacgagccagcttctttttggctttgcggtaaaagcgtggattagcgaccattgatccatttgaatccgttaagaaattatcaaggttgagatctattccaagttgactctgcgtcttaggcaaggctttaacaaaggcaatatcgctgcctaactgcattgataagtagaattgctcgtcagcggtcttttttatcgtcactgtcccaattctagttgagatatgattaagcaagcgctctttaatcagttttctaaaaccagcaatgcggacaacgcctagcttaggcaatttaatatgcttagcatcaataaacctagctgtcccgttatcaagaaaagcttctggctgcttaggatattgacagttggtctgatatgaccagtcgctgcgttttttatggaaagttgggattccatgaccaatcttacgatagttgttccaagccttctgataattttgaatggcattggcaagagcgaggctatcaatttctttaacacgcaaaaagctataagtatcgcggatattctttggcttagccaatagttcgctattagtgactacttcttctgccaacctagtctcataattattaagaatagaaaaggcaaaaggcattgcttgatattgtctaacagctaagtagcccttagcatgataattacttcgattacgtcctacataagagttgtagacaaagcgctgcgcatcatagtttagcttaatgattttcttttgcttagaactaggataaaagcgaagcttaacgccaaaatgataggctaaactgctcatttttttcatgtgtttcacctcctcgtattatataaattgtaattagtcatattgtgataattaatcaaattagtatttgctttttgatcttcacatgttagcctctaattgtcattggctttggtcaactggtctaggttatcacctcctgcagttttgtctgctttataagtctgccacccagacagttcctttatgctctaactcacatgctgtattgattgcttctttttgctagtccttgagcaattgggattaggtgcagctttcaaagaagcaaccagtgaatacttatactggcgagattgaacttaagaactgtaattaggggttaacatgtgaagatcaaaatctatgatcagaaatttgaaagaaaggaggccatttccaatgaaattatttgtcggtattgatgttagttctaaagatttacaggtcgttgcacttgattcagaagatcaaaacaaacgcttaattaacgatagctttgtcaatgatctttatggtgctagtgaactgaaaaaacaaattttagatctagctcaaaataaacactatgatcaaatcattattggcatggaagctacatctatttacagttttcatcctgcttactttttccaaaatgacgaagatttacaaaagctcaatgtagagactgatgtaattaaccccaaagaaaccagcaggtttcataaagtctttgaagaaagtaaaactgatcctctcgatgcttattacattgctttgtatctaagctttggacattatcgagtaagcattgccagacaagacaactatcttgctttagagcgtttaacgcgtaccagatatgaattagttcaagaactgactcgtaccaaacagcacttcattgaagctttatattatcgggttaataaactaatcactgtcgataaagataagattaatactcctcttttcggtgctacaatgatgtctattgtaaccgatagtaaaactctggatgagatcgcggatatgcctaccgaagacttaatttcttacttacaggttaaaggcagaggacgcttttccgatccagataccttggctaaagcaattaagaaagctgttagaggttcatatcgcttaggcaaagtaatgactgattcaattgatgcagtgctttctgttcattacaacatgattcaaagctttaatgaatctattaaagatctagaaaaagcaattgatcgtatcgttgatgcattaccagaaagcaaaattctggaatcaattcccggtattggcaaaacctatacagctggtattatcgctgagatcggaagtatcgatcgctttgataaagaagaacagctggctaagtatgccggcctaacctggaatcaatatcaatcgggagatcacagcaacgaacatactccaatggccaggactggaaacagatatctaagatattacttgattgaagctgccaatctagcaagattacatgatcctgttttcaaaaaatattaccaaaagaagtatgatgaagctgtctactcgccgcataaacgtgcttgcacattaactgcaagaaaattagtacgagttatctttaaattgctcaaagatgacaaactgtacaggacaccgaggtcttaatttcaaaaattggtctaaatttaaaagtaaacaaaagtttaacattaaaaaaatcaacctttaccaaggcttagtttcatatactcaaatttatgatcaaaaagaacaaatatcatcgcctttcatttgacttattaccacatgactcatagattagatatttatattttacagggaagtcgaacatatgtctctattttttaataaaaaagctgactgctaggtcagcttggtcctatccatccccacattaaaatacggggattttcgggcgtttttcattaaatcgatcacacttagtttaagtaaagatatctatgtttatgacatagtaggctatgatgaccgtaaagactgtactattcaagttgacgcaactaataacaagattctaggtcagtctacgcaggtgcttgattatgactacgaaaaagatgcgtctttgaacctaaaaaagacaatttcacgccaagaagctaatgaaattgccctaaaagaattcagtggaggaacaccgatttcatgggaattaactgatgacaataatcaatcaatttgggaagttaaaatgatccacggtaaacacaaacataccgtaaaaattaatgctagaacaaaggctgtaatctaaaataatccccaacttatgcacaagttgaggattattttcttatcttttatctaggttgactatctgcacgtgacttgtaatcaccgttttcagtaccaataattagcttttcgccattcttgataaaatcaggaacttgcacaactaagccagtttccatagtagcaggtttaccaccaccagctacagttgcacccttaatctctggttgtgtttccttaacggtcatttcaacagttgatggcaattcaataccgataatcttgttatcatctgtaaagtccatatcaaccataatgttaggcatcaagaacttaacgtcatcacccaattgatcagctgaaacttcatattgatcataagtatcagtatccatgaaagtataagtattaccttcgccgtaaaggtattgagcctttttcttagttacttcaactaaatccactttttcagttggacgcatggtcttgtggacaactgcaccactcttaacgtcacgcaaatccatttgcataacggtattacccttacctggcttatggtggttagcctttaaaactttgatcaatttgccatcttggctaaaaatcataccttttttcaaattaattgcttgtaccattatttcttctccctttaatttaaacttacctttcgactagtttaaacacgctggaggcaaagcaaatttttttatcaacagtaaataaatcgtattcataatacctagtataccaaattagatgtgccgcaggtatatccgatcaatcaaatgtccgtcagtcttatgcaaaatcaggctagcacgttccttggttggcgcaatatattcacgcaagttgaccagattaaccatctgccaggtttcttcagccaattgaattgcatcttccagcggtccattagccattttatagtaaaaattatctggcttatttttatttaatttaagtacttttctaaagcgttgcatgtaccatttttcaatcaaatcttcttcagcgtcaatataaattgaaaaatcgaaaaagtcactagtcacaacttgtccactctcgggcaattgcaatgtattaattccttcaataatcaatacatcaggattttttacatgaccatatttcccaggtactatatcgcttaattcttgagaatatagtggataaacgatatccttctttccacttaaaacgtctcgtaaaaaatcactgagcaaagtcatattgtaactttcaggaaagcctttgcgaggcattaaattacgccgctttaattcctcattagggtaaataaaaccatccgtggtcatcaagtgtacctttaattctggataggttctactgagcaacaattgtaataaacgcgcagtggttgatttgccaaccgcaaccgaacccgaaataccgatgataaacggagctggtgaaaaacttttatgcaaaaatttgatttgtgctttttgcgcattctttttttgttggtaaactaagtgtaagtaactgatcaaactggtatagatctcatgcacgtcggttaggtcaatcacgtctcctaaagacttgatatcagctaattcttctttggtaatattgactttatctaagggagctaatttagcccattcatttctgttaaaactcgtataatttctcatatatcgtatccatattccttctaaaacactaacttattataatagaaagcgctaaaaatatgaaaaaaataatcctattcggcgattccatttttaacggatatcgtaatggtcaaaatacaaacctagtaactaatttatttcaacaggcactaattaattatgcacaggtggaaaacatttctaaaagcggtgctaccacagttgaaggcgtcgattatttggagcaaatttccccagaacatgatctagttgttgttgaatacggcaataacgatgccgcaacagcttggggcattagtccagaaagctacgaaaagaacttggctcaaatccttagtgcagtaggcaaagccattgttgtgggattgtgcaatcccaatccagaaagtgacatttttcaatattatggtgctgaaagactcgatctttttaacaatatcgcccaaaaagtcgcaaaggcacatggtgcacaatttgtggatattttacctgcaatgagaaacttaaaagacaaatcgacatattatcaagccgacgggcaacatttaactgatcaaggaaatgagtttttagttaatcaaatcgtgccagtaatcaaaaaagacttagcctaagccaagtccctcttcatcatcacatgttctacgccgccttcatcaaacggttcgcctacaacttgatagcccaagctatcatagaaaggctttacccgcatttgggcgtgacagtaaactgcatcaatcttattttgccgtaaaaatttatgcacagctgtaatcattttcgatcctagctgttgtccgcgcgcttcttttgacacagcaacgcgtcctagcatccatttaccatcttcttgaaacagacgacaagtcgctaaggcagtcgtctgtttttgattgagtaaataaacctgaacagcaattaggtcctcatcatctaaatctggtagagttatcttctgttcagccacaaaagtcgtgttgcgcaatctttctacgcaatagaattctctagctgtcatttcatcaatctttttaaaagtaaaattatctatcttcatattacttgcctaaccaactattgtttctgccaaaccatttttcattaagtttacgcaattgaccatttttttgcaattttgctaaaccttgattgaccttctgacgcaaagttttgtctcccttacgcatccccacagcgaacaagtccattggcacgcgatcattctgaattaccttgtattcgctacttttagccatgtgagcaatataatagtcggcataaacttcatctaacagaattccttgaattcgtcctgcattcagatccaagaacgaattagaaatcgtatcatataaaactgttttcttagcatgcagcacatcttgtttagtttcataccactgctctgctgttgaaccagtttgcattcctaattcataattcttcatttgtttaaatgaactaatgtcactatcttttttcacaactaaaacctggcgattacgtaaatatggcttgctaaaagctacttttttctgtcgttctggcgtaatgctgtaaccattccagagtaagtctatcgtaccgttacgcagctctgtaacgttcattgaccaatcaatcgtttgaaaagaaaccttaatgccatattgtttaaagactgccttagctaagtcgatgtcataacccgtcaattggccgtttttcttttcaaagcccattggtacaaaactatcgtctaagccaattaccacttgctttttgctggcaatcttattccatgtatcttgagtattagcttctttttgtacgctttggcaaccagttaaacataatgttaaggccaagacgatacctaaaatccattttttcattgcctaatcctcgcttaacggtcgaaccttgagcatctgatccgccacattctctgcaaaattcaagtcgtgggtgataatcagctgggttaaacccgatttttttaagcttaaaatcattttctcaacttccttacgtaaatttggatctagcgcgctagttggctcatcataacaaagaatccgcggtttcatagccaaagctctagcgatagctactcgctgtttctgcccacctgataactcataaggatactgctgttcacggccacttatttgtagacgttttaacaatacacgcgcatcctgctctgcttcagttttactcttttttaataccaaagtaggtgccaaagtgatattttgtaaaacgctcaaattaggaaaaagattataatcttggaaaacaacgccaaccttgcctgaatcataaggtttaccgtcaatcaaaatttcaccagaatcttttgtttccaaaccggcaataattcttagtaaggtggttttccccgctcctgatggacctacaattgtcataatttctccgtctttcaaggtaaaagagatgtcacgcaaaattcggtgaccgttaaattctttgctcaaattttttacttctaacatattctcacctcaactacttgtaataagaaaagtatttttccagctttttcaaaacaaaagcacaaatactgatcaacagtagataaattacacctactaaaactaacggtactagcgttacgtctctggccattgccacattgccggccctaagcaaatcacctaaaccaatgacataaactagcgatgaatcctttaccaagttaattacttcatttccaattgaaggcaaaacaatttttattacctggggaataataatcttggtcatcgtttgccagcggctcaagcgcaaaactttcgctgcttcaaactggccttcatcaatcgattggaagccgccacgaaaaatttccgcaaaataagccgcataattcaaaacaaaagcaaacaaggctgcttgatagcggggaaagacgatatgaataattggtaagccataaaagacaaagatcaattgcaataataagggcgtgccccgcataatccaaacataaaagttaaccaaccagcgtaatggtttaaacttacttttttcacctaatgagaccaaaattcctaatggcgttgctaaaattaacgtccagaaaaaaatacttaacgtcatgcctgctcctgacaaaagagcgggtaaaatttctgcaatatattttaatgacatactctcaccttcatttttctttcctaataaaaaagccctcttaggattaacctaagaggacgactgctcgtgattccacctcatgttcgcacctgctcacgcagaaatgcctcactaggttgatcattttaaaagaaaaaccctcatagccaaacggctacgagggcgaatgtaatcgcggttccacctcatgtttacaaattgctcacgcaacttgcctcaataagttcaataatcaacctttagctataacgggctatcccggattttcctacttttgttcagaagaccaactcacagatgtgattcatactagcaaatatcttatttccaccagcaaagactctctattactttgactagtattactatttctgttctaagttgtttttaatgttgaataaatcttaaatgatctagcaacttttgtcaattatttttcttcataagtatctggatcaacatcaagcaatggactcttttctccagtataaataatatctagcttatacattgcacgagaggtaatagtataaacaagttgagtttcatccaatttatggtaagcagctttagaggcatcccacatgactaccgcatcaaattctagtcccttagccaagtaagaaggcacaactagagtaccatcaactagtcgctgattagcagtcgcaattaaggtcgtgttttcaccttttttagctaattcttcatgcacaaatttagctgcagctaagtctttggtaataacagctgtcgtacgcttattttgttcattattatgcaaaacgttaactaaaacatcaattgcttcatcatcgttttttctgccccaaattataggcttaggacctttacggttaaaggcttcaatcttttcgccttgacgcaaaatttgcttggtgaaattggtcaattccttagttgaacgatatgatttcgttaattgcaccacatcagttttttcaggatcaaataagccagagatctgcttaagtaagctacgactttcatccttagtaaaaatagcctgattcaagtcacccaacattgtaaacttggcccgtgggaaattatacttcaagtaagctaattgaaatggagtataatcttgaatttcgtcaatgaaggcataacgcatctcaaagtcagtcctgcgaccagtgatcatgtcatacaaatataagtaagctgaaacatcattcatggcaatatggtgctgcttaaagttattcttaacttcttccacatgagccaaccaatcattttcatcaatattccacttagatagatcaaccatcttaggtacagctcgcaaaaagctcaggtattgtgctcgcatattcaaaaagtggttgtgcaaaatacgcttatgcacgcccttcaaggctgataatacaatttttctacctaaaaaggcctcttccttagcctcagactccaattcttgatcaggtcgatcatataactcatttaattcagattggctcattccttcaatagcgtgtgccacccaagccttcttagtttctggcgtaatctttcgattcaacatcttgatcaattcttcacgcgttgcatcaattcggttggccaacttgtaattttcattgaaagaataatagatctccttaattttttccttatcaaagtaaggtttcttcttatcacggaaataaatattcttaaaaataacaccgcgcttattcaagtgctctgcataacgagtcaacaagttaaagaaattaactgaatccttaaacttagaaatattgctgtctgcggtttgatcttcaaactgtctgaataagttttcaacttccatacctggcaaccgtcgcgcaacaaactgccagtaagtcatttgaaccatattttgttcgcccatttcaggcaaaacattcttaatatagtcattaaacaactggttaggactgaacatgattacatcacttgaagtcaggttgccacgataacgataaagcaaaaaggctatccgctgcaaaatcgcactggttttaccagaacctgccgcaccctggacaaaaagcagatctgctttggtgtttcgaataatcttattttgttcgcgttgaatcgtcgttacgattgacttcatctgcgttgatgatttttctgacaaaacttccaagagcatttgatcaccgattgactcatcagtgtcaaacatgttcacaatcttgccatcttcaatcataaattggcgtttcttagtcatatcaactgtaatttcaccttcaggcgaattataagaaactttacccaatttaccatcataataaattgaagatattggtgcccgccagtcatagatcaagaagtgatcgtccttgtctgcaaaagaacctagaccaatataaatcgtctctgttcggtcctcatttttttctttaaaatcaacccgagcaaaatatggtcgcttctctaaacgctctacagtctctagctgcttagctgaatgttgccaagcatgttcacgttcactcaataattgttgctgctggtggattgacagtgctgtttccattgaagtggaataaccatcataatccaatttaacatcgtcaaaaaagtgtgaattaagctctcttgcttcgccttcagctgatttgatagatttttttaaagttttttcgcggtccttgatctgacccataatattatcaaggtgcttttgttcaagttctttttcgtttttttcagttttggctgtagccatctaatcaccttttctttaaaaattcgcataccattttaccatgaatagcgctttcataatagttttcctgctcgtgagaaaaatataaataaaaattgatgaaaactttaactttagagactataatcttgacatattggggtgatatatacatgaaaagattttttaaattactgagaaatgttctcttgcttgctcttatcgctcttggcgtttggacttatcagaacaatcccaatattcgtatcgcaacgcaagactccctagctacacttagctatcgaattaacgaacttctaactaacgaaacgaccatttctcccaataacgaaaaaaagactactaatatcaaaactgacacagataaaacagaaaatgacgattcttcagacaatcgtgtatggtcaaatcctgaagctaaggtttatatcgatattagcaataatgctcaactaagatcagctgcagtcaatgcaatgaacgcttggaatcgtaccggtgcttttacttttcaccaaataaatgataaaaaagacgctcaaatcgtcattaatacagtcgataatagcgacactaatgccgcaggagaaacagcaactacctataaccctgctacaggacatttgttaaaggccacggtcaacttgaaccgttactatttgcaaaacgaatggtatggttacagttacaatcgaatcgttaatactgctgaacacgaattaggccacgcaattggcttaaaccacactaataatgtctcagtcatgtacccaaagggttcgatctatacgattcaaccgcaagatattaaaactgttaaaaagatctaccacgaaaataattaactttaaaagctcacctcttttttctacaataaagtgtgagctttttacgaggagaaaaatatgaaaagaatttatatcgtccgtcacggtcaaacttatatcaatcgctacaataagatgcaaggttggtgtgacacaccattaactacaccaggaattgaaggcgctgaagaagctggtaaagctttaagcgaagtaccttttgacattgcattgtctagtgatcttaagagagcaagtgatacctgtgagatcatcatgaaatataacgccaacaaagacgaattgcagcacatcgctagtccatttttcagagaacaattctacggctacttcgaaggaatggattccgaaatggcttggcgaatgattggtggcagtcacggctacggaacacggcaagaaatgtttgctcatgagagcatcgatactattaaggattggattaaagaagccgatccttatcaccaagcagaaaacgctgaagaatattgggctcgtcttgatgatggttttaaattaatcagtcaattggatggcgctgaaaacattctgctagttactcacggcttcactattagaagtctctggtatcgttatggtgaccatattcctttggttccaggtcctaagaatgcttcaatcactattatgacaatgagtgagaaaggcgaaattaagatacctaagtggaatttaatgcatttatagcaaaataagattaggcgaatcgggcctaatcttattttgtttgtttcccggatttaaaattgaagtgcaacactaagtgttaaacaaaaaggccatgaagacctaaacttgaagtgacgaaaaatcaagaaaggaagatcttcatgaccaattcaaattctagcatttctaagcactatcatcaattaaccagcgtacaacgtggacaaattcaagcaatgctggattccggcataacttcccgtactgttatcgctcaagaagttggctgccataagtcgacaatcagtcgcgaaatcaaacgcggaagcgtcctgcaaagagacagcagctatttattgtatgagcactattacgctgatactgcacagatttattatgagaagcgtcgcaaaaactgctatcagcgcaatccattgaagcattatgctgtctttttgagaatgctctccagacgctttaaagctaaatttgatgccaccagcatcgatgaattcgttggtgaattcaaaaggactatgccaggctacccttgtcccagcacaccaactgtctatcgctatattgatcagggcttgctggacataagcaatattgatctgcctatgaagctcaaaagacgcaggaacaagtgtcatcacggccatagcggtcatgctttgcacaagaagcatcttggcaattccattgaacagcgtcctaaagagattgaagacagaaaaacgccgctgcactgggaaggagatctggttaaaggcgtcagacgcaagaatcagcctgctttaatgactttgaccgaaagaaccacacgctttgaagtagttatcaagattcctgactatcgggcaagcacatgccaaaggctgcttcaaaatgagattgacagacatcctgcctggtttaaatcgatcacgtttgacaatggctctgagtttgcggatatgaccgagatcaaaggctgccagatctacttcgcccacccatattctccatgggaaagaggcaccaatgagaactgcaatggacttctgcgtcaattcttccctaaaggcaaaagcatgaaagataagtcagctgcttatgttcaacaggcaactgatgccattaaccgcaaacatcgtcgaatccttcaatatcacacagcagaagaactcttcaagcaatatatttcctcatagcctaactgttgcacttaatttgacaattcaggattttgtttgtttaattatttttgcaaaacaatatttttatatagcttcactgttattaaaaaacttcctgaaactgtcaaatcttttgtgtaaatagttctttctcgtaaattgattttttaattatttatttaatcaaagtaggattctaaggtgtcctgaacctgaccaaagcctttatgaattcgattgaaataacggtcattgtagctcattgcctgaataccaataaaagcatcaagcgactgttcagttggaaactctgccttaggcttagctttgcgcttgatcacattgttaaatgattcaatcatgttagtcgaataaattgaagctctgatctgcttgggatagttataaaagaccagcagatctggttctatgtctttcaagcttctgataacatggctgtaaaccttgccccatttggtatagaagtcatgcaggacagctgtggcttcttctttgtttgtctgttgatgcacctgtttgaattcgttcatgatcttttcacgatcgtcgacgcgtactttagcgcagatattgcgcatgacatgaaccaaacagcgttgaaaatgagctttaggataagtcctggccaaggctgttttcatgccaacaacaccatcagaaagaaagagttcaacttgcttcaagcctctggacttcatgttttgaagcatctctgtccagacttcaatgttctcactaggagcaatgcagtagtcaatgacttccttatgtccattaggtttaatgccaatggcaatatagactgcttcacgctcaacgctcaaacgtttctcggcgcaaaggaaggtatgtcgcatccaaatagacgcagaaaaacttgtcgcttagcttgcgtttgtggtaagcctcaacctttggaatcatctgcttggaaatatttgatacctgagctggactgtaatggctgccatacatcttttcaattagatcggctatttccctggtggtcacgcccttggagtaaagcttgataatcatgctttccaagatatccgagtgctgcttgtagtcaggcagcgtgtgctgatgaaattgaccgttgcgatcccgaggcacttgcacttcaattgggccaaattgcgtatcaactttgcggaaataagcaccatttctagagttgccagtattccagccatttctggcatagggatcatagcccagaaaggcagtcaattcagcttctagcaagttattaacagcctgttgtagttctttgcgcaataaatcatttattttgtctggattgaatagagcttgagcaaaatctttggtaaaatcattcatgaaggagttcttctttctgtatgtgtttttttgttcaaaccaatcatacgagaaaggaactcctttttctaatgtttaaagaaataaatttaaggaatcattcatccttacacaaactattttacagtctcaacttcctactatttttaacagtaggaagtcttactctaactaatctttagtcacttgttttagtttttattaacttacagtcgcccaaagtctgaatcaattgtttgccatctttttggtggaaaacagcgttttgatacgacaatcgttctttctttttactcttatctttatactttttaataaaggttacttcatagttaatccgactataattacgcttacctggtaaaacagagagcaccttgatctttacacttaatttcttgatactcttctttttatgccattcctttagttgcttagcaatcttcttatagtctgcattttcttttccattttcaaagtcatctgcatttggcgacttaagggtgttgtacaatagcttagctgcatccccaaccttaatcaagccaggccaaatcgggttaacaatatagtcaccttctgcatcctgatagacatctttttcgccattgccttgatattcagcagtaccatcataatcagtgacgtcatcctcactattagaaaattctgaactaatcgactgcgacaaatccgttaccctttcggacttaatagtttgaccatctgccttactcttaatatagatttccattcgcttagcaatcggataatccttgaaagtatagctaccatgctggttcaatttacccgccttacgatcattgatatagatcgtaccattaggaacgctgcgcacttggaaagtggccgttttgatcttcatatcaacagtcttatctgaccaaatgttaacaatcgaatcagcatctaaatggcgaccattaaccttagatttaactaatatatgatagcgaccaggaaagaccatacctaaatcttgatagtaattctgattgccaccttccatttcaccataatccttttggttaaccatcaaagttgaattagcgtgattggtcttcacctgtgggcgatatacttgtatccacaacttatattttggaaaaagcaaaaaattgcgtccatcttgaatcagtctgatttcaccatgatcgcgattatgacgcaaattataggctaaacgtttagctgcactgtgatgctctttaaagtaattttgaagcggcttcagcgatttatctgtcacatccatatcaggcgttgaagccgtgacatactgagctagctcagttttaggatcctgcattttagctacaatgcggtcaatttgacgttctttagtgtaataaaaattgccaattagccatgcaataccaattaacaggataataactcccgatatccaaattttcttatgttttttcattgatcaaaacaccttttcacaaatccttttaacttagattaacaagttgatcaaaaaaagcaaacatcttttgttcacaaatcaagacgaagttcttattatatttagtagcattattttattttggaggggattgcacagtggaagtaaattttgattttgtaaaaaatagcagcttcaaggaagcctttcctaccgctgaaaaaatccacaaattatacacaattgatgattatcgtgacgttatttcaaattcacgtcttctattagagagtctaatcaaaaaaatttttaagttagaaaatctcagtccatattacacagttcatgatggcgaacaccgtaatttgcgtaataatacacattatttacgcaatgaactagattaccctctttcgatcatggatttatttgacgaaatacgctgcatgggcaacgctgctgtccacgataaccaaattgaaccagatcaaaagcaagcctggcactgtatttgtgatttacacgatattcttgtctttttaattaacagctatgacggtcaagacctatattatttgcgtcccgatattgcgatggaagcacaaactgatgaagaccattattatgtgcgccaaaataagcaaccaaaaataatgaaattgcatgatcatcaaaatactaagaaaaaacagtccgcatctgcaccaaaaaaggcgaaacatgttaaacatttttccagtaaacagcatatagagcaaactaactctgagtcacaaacgaaaactactccttccactaaagacaattggttaagaaaaattaaagaactctttcaccatgattagtcatattgacactatgtcacaatatgataaactatatattatataatttacataccgagaagcgcctatgacgctgccgatacgcaaatgaaaactgaacaagtttctcaaatggggaacggcttatgctagtaggtcgttttccattatttttttacgaaaggagtggttagtccgctatggataatcacaggcaaaaaccttgggctgtcgaacagtctgaggtattaacaaatacaaaaacaaccgaaactggtttaactgaagacgaagttcgaatacgccagcaagctggtttaaacgagctcgcagctaaacctcttaaaacagtaatccaaatggtcaaagagcagatttttgatccaatgatcggtatcttattagtagctgccctcttatctgctatgtttggcgaatataccgaagccattattatcgcgacaatcgtggttcttaataccattattggagtagttcaggaaaagaaggcacagtcttctttagctgcgttatgtgacatatctgcgccaactgcccatgtaattcgtaatggcaaagaattaatcataccggccaaggaattagtagttggtgatattgttaccttgcatgatggggacatggttccagccgattttcgcttaattgaaacagctaacttgaaaattcaagaagcatcccttactggtgaatcagtaccggtagaaaaagacgcagctgctgttttaaattcagattgtgctcttggtgaccgcatcaatatggctttttcttcctcaattgtgacttatggtcgtggtcaaggcgtcgtgacagcaattgggatgcaaacagaaatgggtgccattgctggcatgttagaagatcaaactgaagtacaaacaccattgaaacgcaaattagctaaagccggcatggtcttaacgactatcggcttaattatttgtagtttggtctttgcaattggtgctttctatggccgtccacttttaccacaattcttggttgctatctcattggcaatttcaattattccagaaggtctgccagcaaccgcgacaattgttatggccttaggcgttaaacgcatggttaagcgtaacgctttgatcaaaaagctgccagcagtcgaaaccttaggtaacgccactgtcatctgttccgacaaaactggtactttaaccttaaacaaaatgactgttacacaggcagcaacgaatgacttcagccaaagtcacgtagttgaccagcttgcagcaaacaaaaccaatcaaactttggcctatgctagcgctctttgtaacgatgccagcttgaacggtgaaaaagagattggtgatccaactgaggtagccttaattccttttgcccaaaagcttggctttaaccaatctaacttaaagaaagaattcccccgtttgttcgaacaaccctttgattcggacagaaaacggatgacaacattgcacaaaattgacggtcaattaacggtcttcactaagggtgcaacggacgaaatgttgccgttatgtacacacattatgactgacaatggcgtgcgtaaaattacaccccaagacaaaaagcaaattgcccacttgtctcaccaaatgcaagctgacgctttacgagtactaggctttgctaccaaaatagtggataacttacctgaagcaaatgctgatttggaaaataatttgacttttatcgggattgtcggcatgattgacccaccacgaaaagaagttgcagcatcagttaaaacctgccgtgaagccggtattcgcacaattatgattaccggtgaccacaaggtaactgccttggcaattgcgaaaaagttaaacatttatcagacaggtgacttagcaatctcgggaactgaattagaccaaatgtctgatgcagaattagatcaagctgttgaaaaggctaccgtttttgctcgcgtttctcctgctgacaaactgcgcatcattcaaagcttaaagcgaaattgtgaggtaacagctatgaccggtgacggagtaaacgattcacctgccttaaaggctgccgatatcggtgtcgctatgggtgtaacgggtacagacgtggctaaggacgtggctgatatgattttgcttgatgatagttttaccacaattgcgcacgctatcaaggaaggtcgccgcgtttaccgcaacatccaaaaagtaattcagttcttgctagttggtaacattgctgaaattaccactttgtttgcggcaactatttttaactgggatgcgccattattggcagtacacatcttgtgggttaacttagctacagctactctacctgcccttgctcttggcgtagacccagcaagtaaaaacattatgaaacacaagccagttaaagctggtactttattcgaaaaagacctagttattcgggttattacccaaggaatatttgttgccctgcttactttaactggttacttcattggtaaagaaaccggcaatcaagttgtcggacaaaccatggccttcagtattttagcattggcccaaatgattcgttcatttaaccagcattcaaatactgatcccatctggaaaagatcatctggtaataatccatggttaacagtgtcattcattatctctgcatttttcatgggtattattctctttgtcccagcaatgcaagatgcatttcacattaccagtttgtcagctggacaatggttaatcgtagttaccctagctttactttcaattgcacaagttgagttagtaaaaggttgggcaaagtttagaaatatttttattaatgacaataatttaattgaagattaattagttacaaaaagacggtagtacaacactatcgtcttttttgatattaaactttggctgctgccaattggtcaacatctatctgactacgaccaatctgaattgccttttcggtactttcattcaagctagcattgatcatcttatggctaagctccagcaccattggcaaattaacaccgctaattacccgtactcgctcaggatacatatcttcatattccgaagcgactaagtggggtgtcccattttttaaatcagttagcaccaaaatctgactattctgatatttattcatgactttagcaaaacgagccttaaaatctctgattcctgtgtcgtttaattcaattgtcaggatctgatcattcttgcctgccaacatatcatgtgcagacattagccccgcagccaacccttcatgagttgcaattaaaagttccataaaacgcacctctttgtaagcgatttctatagaaccattttaacatatttttgtattaattaagctgttcaatatctgctaataagctactttgttcaggtgttagccgctcatccttttgccgtaacttaagtacttgtagacaagtgtgcaaaatcttttttccttgttccgtcacttgtttgccatccatatcaggcgttacactggctaaaaagtcatccatctcatcagcagtaaccttgaaaacatcattttctccatgaatcaagggcatccgattgagcatttcttcaatcatttgtaatttatttctagcttcttcaaaatctatcttgttcacatccaattctttttcttttattatacaaaaaaacagccacctaagtgactgtcatctttatttcgtattaataattgcgtttgaaattgtagttgcattagattcgatcagttgatgtgaattattaataaaaagggaagccccaattcctatagcagcaaatacaagccaaactttctgtaaaactgtactcttcatgttcccagctccttatatttcttattatataaaaagccgatcgttatggggatggctacgcttacaattaacataattgtaatattatttacctttacttaagagttacttctccagcaacatttgtatcaaaaaagtcagcaatttgatggacgtccatcccttgccctaaagcccacattaatttggtaatcgcactctcagaagtcatatcacaagcagaaatagctccttccagtaaagcctcacgccccacctcatatttggtcaaatcgctacgttcatacaagcattgactgctggctacaacgggaataccttgacgaattagcataccaattgcggctaccatgttgcggcgaataaagttcatcccgcctagaccatatgcttcaataacaattccacggcaaccactattaaccatcgcaaaaagcagattaggatcaaagcctggaaatagtttcaccaacgatacgtgtgaattaattttggtattcaaggttggctgaccgtcatgttctctttgaaaatgttctgaattaaaaactaatccatcggaagaaacggttgctactggtggcacattcacactttcaaaagcatcaaagttggtagtccgcacctttacactgcggcagcccagcataactttattatgaaaggctaaataaacatcaggtggacaagttgctgcagctgcaaaagccaaccgtaggttatcgtgagcgtcacttaggaccacgttaattggtacctgacttcccgtcagcacaaccgggatattaatatttttcagcataaacgacaacattgatgccgtataagccatagtatcagtaccgtgtgaaacaacaattccatcgtaatcattgcggtatttgtagatattttctgcaataaatttccattcttctggttggatattagaagaatctaattgcaaaatatcgcggacttgaatgtcgtacggcaactttcccaacattttaattaactcttcaccggtttccttgggtactaggcctgcatcagaagcaacggaagcaatagttcccccagttgatagcaataatattttcttcatcttgttcccctttatctcaaatcacaatgtcgaccataactattcatgattagatcaattaaaacataggccgaactaaaagttaccgcattttgcttactaaattgaaatggcgtagttttgaagaaaaagctatagtcgctaagagaggctaattttcccgtttgccagctagtcagtgacaccaatttcagttcagtattcacgacatcaatcttcttaagttcttcaataattgttttattaaaaccaccaaatgaaataacaaacagcatgtcattttcccgtgcagaccgccctaataatgccacttcgtcgcgtgcactaggcaaaataattgcttttttaccaattaagaaaaagttatgcgccaaatattccgcgataatttgctgctgccagccagtagagtaaagatagatcgtttccgcttgatctaaatccgcaaaaaatggttgtaagtttaatcccttaaaatatttaaaagtttcagcaatgatcttttgtaaatccgtattgaaatctagcgtttgcttgttcttaacgttttgctcctttcgtgtagctaactcggacaattcaaatttcaattcgctgaaaccgcttaatcccaattttttgcttaggcgaaaaatagcggacttagaaacgtataatttctgagctaattccagcaaactcaactgacttgctacttcaggatatttcaataaatagctaacgatcgctttatcggtctcattaaaactttcctttttcttcatgaccgctgtttctaaatccattctgtttcctttctcatcactgtttcttattaagaaaagaatatcatgtcgtactcaaaaaaggtagccaccctatttgagtaactaccttaatttttattcttgaattgaagttatgttatgacaattaattatttaagttctggccagtatggagcattaactggaatcatgtcatccaaaatcttcttagcaacggaagcatctggtacagtcttgtttaatgcaaatgcttgcagcatcttattgtatgaatgttcaacataagcatcaacaaccaatttttcacaagtttgttgttccatcatcaagcctctttggaagcgacctgctttacccgtagccattggttgaatgccatcagcaccaaacaatgctggtacttcaacaattgaatctggatccatattagaaattgcaccgttattagcacagttagctaagaacttttcatgagtgttaaatgcgatcgcatgacaaatatctacgatatattcagagtgcaaacctgaaatatcccaaatattattcttagcagttcccacctttacgattctttcacattcgccaaagacaatcttttgccggtgttcacgaatttcatcagtacgagtatgcttcggatcagcattagcaacttcatattgtgggaagtagtagtattgcatgtaattgtttggcaaagtttctggctctagcttatattcatcggcaactttcttaaaggtggcttcccaagaagcttcagtatccttgtcgtaatcgccacctacccaatagccgtgctctttgacatattccttcaacttaggcattaagtcttcgccagtcttcttgttgcgaacttctttccaccagccaaaatgattcaaaccataatagttaaagtcaatatcatgccaactgtccaaaccacaaatggcagccattctgtccatatcatcaatcggcatatcacaaatgttaattaccttagcatttggacgaagacgacggcaagcttctgcaacgattgcaattgtgttggagtagttgatcatccaagcatttggtgagtattcttccatccaatcaataatttgcaaaattgcgggaattgagcgaagaccataggccattcctccgggtccagtagtttcttgaccattcacgccatattttaatggaatcttttcatccaagcttctcatgtgatatttaccaacacgaattgatcccataacaaaatctacatcagtaaaggcctctttaggatcagttgtgtaagaaaacttaatttgaggtgctctttccttcatgataatttcaacagctttggcaatcttttcttgccgttcagcatcgttatcatagaacttcaactgtcttaatgggaatttatcctgactcttgattaaatcaaggacaaatcctggagtaaaagtactaccaccgccagcaataactactgaatatttcttaccatccataatctattttctcctttaaataaaactaagtttttatctctgtttcatttgccttacgcatatatttatatcatcttctcccacaaatgtattcgttttcaccagcttcagactttgtttcaagttttggaacgcgtttcactacgcgaaatatttttaaattttgccttaagcctaacaaatcaggtgtttaacttgcctttattagtaatagtgtaaaaatgaaaaaaataatcgtttcatgaccaagataaactataatttgaacattcctttaaccacaaaaataaatagtccgtatttgatgatcgtatagttttaatgaaactgtcaaatcttttgtgtaaatagttctttctcgtaaattgattttttaattatttatttaatcaaagtaggattctaaggtgtcctgaacctgaccaaagcctttatgaattcgattgaaataacggtcattgtagctcattgcctgaataccaataaaagcatcaagcgactgttcagttggaaactctgccttaggcttagctttgcgcttgatcacattgttaaatgattcaatcatgttagtcgaataaattgaagctctgatctgcttgggatagttataaaagaccagcagatctggttctatgtctttcaagcttctgataacatggctgtaaaccttgccccatttggtatagaagtcatgcaggacagctgtggcttcttctttgtttgtctgttgatgcacctgtttgaattcgttcatgatcttttcacgatcgtcgacgcgtactttagcgcagatattgcgcatgacatgaaccaaacagcgttgaaaatgagctttaggataagtcctggccaaggctgttttcatgccaacaacaccatcagaaagaaaaagctcaacttgctttaagcctcgggatttcatgttttgaagcatatctgtccagacttcaatgttctcgctaggcgcaatgcagtagtcaatgacctccttgtgcccattaggcttgatgccaatggcaatatagactgcttcgcgctcaaatgtttctcggcgcaaaggaaggtatgtcgcatccaaatagacgcagaaaaacttgtcgcttagcttgcgtttgtggtaagcctcaacctttggaatcatctgcttggaaatatttgatacctgagctggactgtaatggctgccatacatcttttcaattagatcggctatttccctggtggtcacgcccttggagtaaagcttgataatcatgctttccaagatatccgagtgctgcttgtagtcaggcagcgtgtgatgatgaaattgaccgttgcgatcccgaggcacttgcacttcaattgggccaaattgcgtatcaactttgcggaaataagcaccatttctagagttgccagtattccagccatttctggcatagggatcatagcccagaaaggcagtcaattcagcttctaacaagttattaacagcctgttgtagctctttgcgcaataaatcatttattttgtctggattgaatagagcttgagcaaaatctttggtaaaatcattcatgaaggagttcttctttctgtatgtgtttttttgttcaaaccaatcatacgagaaaggaactcctttttctaatgtttaaagaaataaatttaaggaatcattcatccttacacaaactattttacagtctcgttttaattacaaaatacgactcaaactagtttcacttccatattttgtagtgtaattttgaaattaattataattttaatatctttctgctattttctatacaatataatatttttaaaacatatctttgctaaacgctgattttatcccaactcttagtcattagtacttgataatttacagataacttaggttataattatatatttttttatataaatttagcctttatcaaaaaactttcgaattatttattaaccgtatagtttttattttaggtcgccctaagtcttgataaactagtactctaaaaaaataacatccatgttttttatttaacacgatacgttattaaagcttttcatgtatagactttgtttttaataatgttagtatcattccatgaagagacatataacgagctttaaggaattgactactccttaagcaaaaaaatgacttataaattggaaatccttttcgtaatataaggggattaagaaaaatgacaaagaatgttaagctattatcacttatcggtatcgcagccgctttagcaggtggaagtgttgctatttcaaataataacaactctactgttcaagctgcttatatcacattacctgctggttacaccaagagtgccattattaaatggaaccaaactggtaaagcaagtaaggctttgattgatgcttctaaaaaaggcatgaaggaaaacaccaatagtgatgcgggttcagataatacgttagttaacgtgactaaattaactgcgtctcaacaaaaagaactgagccaatacactttaagcttaattaattctgcacgtcatcaacttggcaagcaaggctggacttacaaacgaggtgctttgcactttgcaaatcgtgtagctaacgaatactacagccataacagatcttgctgggatgccgaccactatgttactggaattgaacgcgcagctaaggcttctggccttaactcaaaagtaggtcaagtctacgaagatgaagctggcttacctatctcttcaacatacaatactaacttacgtccaatgtcagtattgaaaaaccaaatttactttaacgtaaagcaaatgctttttggcggttttgcaggctctgacagtcagatgaatgactcatctagatacactgaatgggaacacgctggtgatttacttggttgccgtactaagagctacgatgctaagactaaatactttggtattagtttcagtggcttaaagggtgaccaaagcaaggttagtgttaacatgatgggtgttgctaaatgttacatccaaaactacagaaaattcaatcattaaaactaacgctgtagttaaaaacttaatacagtttcctaatccaagagctcaagtagttcagtcaactatttgagctcttttatttttgcccatttttcatcaaaatcctgtcaaaaaaatgcagatattcacacattttcaattaagctatctaattgtttgtatacattagctaatactaatagtgtgttaagttattatcttattactattttgtctataatccttgataaatcaatgtttccagcaataactgtacataattaacaacagtacagcaaattatgattacaattaataaactttttcaaaagcatttttacgttatccatgcgggattttcgcttacacaatctattacattattgttatctaaaaaaaggattgctatattaaatagtaactggtatattctatatcaatatgttcaatgaacataaaaaagggaggataaagatgtatttcactactacaagaagaaaaactaggaaagacaggatacatatccaattctttgcacaagtcttaaaaaaagacctatcacaaggaactgtttacaagtattcagttcaaagattctgtgaagctgcaaatatctgtcgcggaactttttaccgcaactttaaaaatttgaatgatctatttagtcaagtactgcaattcgaaatcaattcttgcttcaacaatccccaatcaagtactttacataaaaaagcacacaacttactgatagaaattgaaactaatgccacctactatcgaaatgtacattctcttgcctcaagtcaaattcgaacacaagttgaccaagctctttttcgtgaaatgcaaaaattgctattcaatagtaatctttctaataagcatatccaaagcatttccagtttgattcttattcgaattctagactggattgctcatgactatcaggacaatgtcatcacagtttatactgacgttgaatgcctttttctccatcacattaaaaaaagttgctagcaacgaataccaatgtcattaagttaagacattgacaattaagggtgcttttttagagatcgaatcatttggattcgatctctttttttgtataaaataaaggcgaaaagaccagccttttcgcctatcttatatattatatattttaaaccttcaaaattattgccagaaagatggtgttaattatgaaagcccttcataagaatattctagaacgtcttgatcaaattatcaataatactggggatcatattcacgattttattaataatcctcatgcttttaccaggaaacgcactttagatgcagcgacagtccttaaaactacaattaacatgcaaggtcagaatttaaacagtgaactctttagagcttttggcgaagatgcaactaaaaagaacgataaagtagttagtacttctgcctatgttcaacgcaaaagccagctttctcctgcttgttttaaacatattctgactgtttttaatcaaaatctatttaatattcaactttttgatcatcactaccgtttgtttgccattgatggctctgactttaatcaaatctggaatccgaaatcgaataacattgtacaagcttcttctcataaaaagaaaccctattgtcaaattcacgttaatgccttatatgatctattgaataatacctaccaggattgtatttttcagcctaaatcagaaatggatgaacgcaaagcggctgttcaaatgcttaaagctttgaattgtggtccatatattgtaacaatggatcgtggctacactagtttcaatatgattgaaaactgcaatcgcctgcctaactgtcattacataatacgaactaaggctggacaaggcggagttaaagaaataacgacattgcctgatcaagaatgtgatcgtgagatttcctgcctggtaactacttctaactattactacatcacgcataaagccagtgagaatattcaccatgtccagcatcattatcgccaatatattaagtatcgctctaaaaatacccaggatctaagctgggattttggcgagttatgcacaataaaatttcgagcctgcaaatttagaattaatgatgccaaatcaggcaaagaagaatgggaagttgtgctaaccaatcttgatcgaaaaaattatccgctaaaaagaattaaagagctttatcatctgcgttggggtattgagacctccttcaagaaattgaagtattctttaggcagtgtacagttccattccaaacaagataaatttattgaaatggaaatttatgcccatatgattatgtttaatgcaatcagtcaaattgatgcacaggcctatattccgcaaaagcattgcaagtatcaatatgccatcaatttcaagcaatcatgcttgattattcagagcatgtatttggcttcttctttaacgcaagattttgaacggatccttattcagatcagctattataccattccaattagaccaggccgcaaggacaagagaaatattaagcccaaatcagctgtatattatttatatcgcgtagcttaaaaaagcagaatctgtgctatgccttatttgttgtacgaaaaaagcaccaatttaaccaattaaatgttaaatcagtgctttaaaagtctaatattaattgtcaatgtcttaacttaatgacattgcaacgaatactagcaactttttacattaagcataaattttacgttttaaaataccgacataaggtaaattacgatataagccgttatagtcaagaccataccctactaaaaatgcatctggagcttgaaaaccatagtaatcagcatggaagtcaactactctagttgtcggcttatcgagcatcgctactacttcaacactagcagcaccgcggtccttcatcacttcacttaaagcttgaagcgtacgacctgtatcaataatatcttccataaaaattaccggttgatctttaacatcagattttatatcttgagtgatctttaccttgcctgttgattcggtaccggcataacttgaagccttaattggatcaactgtcaatttaaagttaagtcgcttgatcatgtcactagcaaaaatcattgccccatttaaaacgggaatgacaatcggctgcttgccctcatatttttgattcaattcagcagccatctcatccatgcgcttatctaattgtgcttgatcaaacaaaattttctcaatgtcgttattcattatctgtctaccctttgaattcataattttaccaatgatccgattctagcatgattttgaattgatttaaagctttttagtgcttaaattgcataatttgttcatttattgtctatatggactataaattgttcgggtttagtggaagatagtgttttagtaattgaatatcacttttttggataaacataaaaacagcattctttcagccaatgctttaggaatactgcttttatcttaaatcttcttaatcatatggtcataagtacgatcgccaatcgtcatcgatttttcaatttcataacccttatgcttgtataaagcttgcgcacgtggattttctttgtccacatttaagctgataatatgatagccatgagctaacgctacttgttctgcctcgtccatcagacgactagcaatgtgttcaccccaatggtcgggatgtacagctaacgcatcaatataccactcgtgtggccaagcttcttgatcatcaaaaatcacggttgaaatgagtaaaccagcatttgcatagttatggcgcaagacaacatcgataatcttctggtccttataaggatacatatctaaaattccggtcaccttaccatgatcttcagctacccaaattcggcggtatgaatagcgataatcctcggaaatgaaccctaatttcattaagctatagaattgatcttctggcaaagattcaatcgacttcatctgcatttcatcaaaaatttgctttaagatgggatatacaaaaggaaaatctgtttttcttgctcttctaatcatttttctccctcaaaaattactcatcgtcatgatcattatcaaacaaatcaacatcatcaactacgtcaaacttaattggatgttctggctgatgcttcaacatgtcaagcaaggtagttgccttaggttccaataatttgctgtcatgcattaaacgatacagtgcaaagacctgtgcatatgtagcccgaatcagcaaaccatcaacctgataagcggcatcattatcgtctactaccattgatgtagtcaaaaagtcgcgcatctttctctctgcataatcgtcacccatcatttcctttagtgctggatccatgtcggcgtatgtatgtgacagcttagtaactcgttcaaaattgtaagccaaatcaacattaatccgttcaagactgtcctggtctaactggccttgattcttgcggatttcattagctaaatcatcgattgcttcaccaaatgcaccaaaaacataatcaagtgtcaactgggtctccaactgctctggttccatatcgactaattgtgctgcattctgtgcattccaggcaaaagatgggctcaaaactcgtcctggtgtctggaacaaaattcctgtcaatccttgcttagcagaatattgaacgttaattgaaccaggctcaaaatcacaacgtttggttaaatttcctgcggcagactgaatcttagggtatagttttgctacaattcctgaggtgtcgccttgatcactgtcgatgacgattgaaccgttttgccaggtatcatgcggattattttcatccaaaacagagaaattcgggtcaggagtaaaaccggcatcaatgtcttgattaggtacataaatcagggaatgacctaagaaattagtgattacatttgcatcttgatcgtcactgattgagtcaatataagccatcaagctgtaaagatagccatagcctaacttgttgataatctcaattaattgatccttatcttcgttgtcgctagcttgaacgtagctattcagcttttgccgcaaatcatctagcgtccgttcattggtgttagacaagtagccatcgacgtcagggatgctgtaagaaaagccgaaaactaagcgatacaagtaatccagatcggcacaataagcgtcccaatcatcatcactaatctgacctgccgtatcttgcaaatcgcgggcaaaattaaggataaacgaaatggctaaatgagccgcacattgctctacactctcattttcaatcattgttgcaatcttagtacctagaatatcatttcgaaaaatcatcacatcattaggcgactgcaaatacacaatcaaatcgtgctgctcttcgtcatattccacgccaaaagaatctgcagggatgagattattttgcaccaatgcttcactagcctgacggaatttagcagccaatttttcagcctctggtcgttcaatcggatcgcctattagattgctatcttcattgttacccacggcttgatcagccttatccggcgcattttttaatagagaaaaatcaggatctggcttgaacagatacgaatcattcgggatctccattaccatatgatagaccacgcgaccagctgcttcgtcatcatcagttgaacgttgcacttccttaggaatcgccaataaataagcgtcaggcatttgggctaattgagtttcagtctgggctaaaatatctgccccatatagaccactagctgctaaaatgctctgcaaattttctcgcacatcggccgtggacattttatccgtgtcacggtaatagctgttaatttcggcatttttttgcgtcaatctataccaagcgttgtatagataatccatatcctgacgtagctgcttaggatcaagatccacacgctcttcaggcttcgttgcgtccataaaactgccagccaagctaacgataatcccctcaccgttagaagcatcatcttgttcaagaatgtagccataagtctgatcattcaagagcaggctaggaatagtcaagttgttaggtgtctgtaagtaaatcaaaacactgtcatcatcaggattaagttcggcgctcaatgaattagggacaatgctgccgaggctgtaaatccaaccgattgcactgtcgattttgttaattacttgttttagttttgcatcttcagtcatggaaaaactccttcattattatcgaaaaatgctgtaagcaattacattttcacatatttacgcctcgattgcattctttttgccggttggatttggtttttgggggttgaattctattttttaagcagggaggggaataccaaaatattatcaaacaaaaagtcctgctttcatagatagtacaattttatatatttgtactgtctactaaagtaggactatatcacacaagccagcgtctttaatttttacatctaagccgcaggaatattcttcagctcattctgctcggccactctaaagaatgggagataaatcacaatacctattgcaatcaaaatacactcaaaaataatgtttctccaatccatcgagctcatgtaagcctggaagaagaatggagtaaacgatggatcaacaatataacccattccaatccagtgaagactttcagcaaagtaagtcaacacaatgttaataactggtgcaatcaagaacggtattcctagaataggattaaagcaaattggagtaccaaaaataattggttcattgatactacaaatgcctggaataattgaaagcctaccaagtgcacggtacttttcaactttactattcatcataagaatacacaaagccaacgaattaccagaaccacctaagacagcgattctgaacatttgcaaattcatcaaatgagtaggagcaagtccctttgcaactaatgcagcatttgcaccagttgctgctatacctgtagcaaatacaattgggaaaatgacattactaccattaaccccaattagccaaagcaaattacccagagtcacaatcaaaatgtaaccccataagctgttagctaaaaaggtagctggagttaagcatttcattataaaggtagtaaaatctgcatgagtcattccaactagaattagatctgcaccatagaaaataaagatattaaccagtaatggaatcaacgaattaataaagttagctaccattgggggaatagaatctggtaatttgagcttaaaattacttttttcaattaaacgattaatttcaactgcaagtagtccaataataattgcaacaaataaaccattcgttcccaaattattaatgtcgatcttattatttttatcaacagttgtagtgaccattaagaaagtaactaacgaaatcatcccatcagttgctggatgctctctgcggtatcctttgctcaattcatatgcgataccaaaagcacaaatcatcccaaacatacccattgtcatattatatggaatagtaatttgagcataatgagcgactgcccaatatttccaggcagcaatccatttcatgaagaaattagctgttgctggattatatttatccataacaattggagggttagcaacaattaagaaaaaggaaccaattaccaaaaatggcaatccgaaaagcataccatttgaaatggcctgtaaatgcttttcatttccaagtttttgtccaataggcgttaaaactttatccaatttagtaatcagtgattcttttttagcagtagtttcggccatcagaaatcacctattttctttactaaaacaaaacgctttttaattaaatttgatatggattgaacttgaatgcgttcggaattaccttactgtcatcccagttttcacgaatcttatgatattcgtcccaataatgattattcacctttaattgcggtgtaacttttgaatcaacttcaaggaagtgcatacttcctcttcccatcttcttgccacgtgtagtatgcttgtccaaagcataatccggaatcttagggacatagcctaaagcaaagtttttgattataatgttcttaagcaaatctgatgaacggtctttagttgattcacacagatagcgaatagcgtgaacaaacatcatagcacgatccggttcgttgtaactaaagttttgacgcatctgatttaagctattgataagaattggagcttttggattacccatgccgatatcttctactgaaattgcttgaagacgacgccataatttttcttccatttgtggggatgaaatgtacatctcataagcaaattcacaggcagccctttctttgcctttccgaatcgatttttgtaaggcagagataacttcatccgcagctaatccattacgtgttcttgttcttgcccatggatcagctaaaaattctctatctctgttttgtggcacttcgtttttcttaacatcattttctgacataatgagtccttcctttgacacacgaggagaaatacaatgaatattcaaaccatctgcgagaaatatcaacttaataaagatgaagaaaagatccttctttatatgaacgatcaccgttcagagctgaaaaatctaaggattcgcgaactggctaaaagaacattcacttctcccagctttatcgtcaagacctgtaaaaagatgggactttcaggatattcataattggtctttctaattacagatacaccaaagttccctaataatactgaaaatgacttaaaagtaagatcttgcgtaaagcctttctccaatttgatggataagcataaagactcaatgatcatgatattgggcagtggcttttctcaaaatattgctaactatatgagtgagtatctaaatttatacggttttagatgtactgcaaattcacatcttgaattactccgtaaaaataaagacgctctaataatagtaatcagcaattctggagaaaccaaacgtttagcagaactgtgcattcatgctaaacagaataatagagatattctctctttcgtaggtgaccgtaattcaactattgctaaaaactcatcacttgtaatcagttcagatacgtttactccatcatcctttgatagtcattaccctcagctgttttttggtctaacactcatctattttgaattattaatgagttactttttgtctaagtaggtacctttccttaagacactttcatcataagcgctaggcaattgatttaaaaggttttagggcttattgaaaacatattcttatttttaaaaacaacctgaattgtcaaattaagtgcaacagttaggctatgaagaaatatattgcttgaagagttcctctgctgtgtgatattggaggattcggcgatatttgtggttaatggcatcagttgcctgttgaacataagcttttgacttgtctttcatgctcttgctcttagggaagaattgacgcaaaagaccattgcagttctcattggtgcccctttcccatggagaatatgggtgagcaaagtaaatctggcagcccttgatcttggtcatatccgcaaactcagagccattgtcaaacgtgattgatttaaaccagtcaggatgtctgtcaatctccttttgaagcagcctttggcatgtacttgcccgatagtcaggaatcttgataactacttcaaagcgtgtggttctttcagtcaaagtcattaaagcaggctgattcttgcgtctgatgcctttaaccagatctccttcccagtgcagcggagcttttctgtcttcaacctccttaggacgctgttcaatggaattgccaagatgcttcttgtgcaaagcgtgaccgccatggctgtgatgacgcttgttcctgcgtcttttgagcttcataggcagatcaatattgcttatgtccaccaagccctgatcaatatacgatagacagtaggcgtgctgggacaagggtagcctggcatagtccttttgaattcaccaacgaattcatcaatgctggtggcatcaaatttagctttaaagcgtctggagagcattctcaaaaaaacagcataatgctttaatggatcccgtttatagtagtttctgcgtcgcttatcatgatagatttgtgcaatatcagcgtagtaatgctcatagagtaaataattatgatctctttgcaggacgctaccacgtctgatttcacggctgatagtcgatttgtgacagccaacctttcgagcaattgcggaacaggaggttatgcctgaatcaagcatagcttgaatttgtccacgctgctcacttgttaattgatgataatgtctagagacgctagaatttgaattagtcatgaagatcacctttcttgattttgggtcacttcaagttcaggtcttcatggcctttttgtttaacacttagtgttgcataaatccgggatcataaaaaataaccaacatccattaaaaatgttggtcataaatttactaaatattcttttttattacatcttccgaataaacgtgttcatatcgtatgggcctaccttgtagtcagagcgatccacttcttccagagcatttgtcttaatatagccctttttcttcaagaatgaaagatcaatagtttcactagtcatattggacaaacgcaataccatcgtatccttgatagtataagcaggataaagtgctgaaacttcaataccatctagtaagttaaggtctaagtaggattcctcatctgtgatcttcggcagattatctggaaattcaatgtcccagatcttgttatccaaacgatttacaaacaaattgtacttttgaatttggtaagaaacatttggactaagccatttatcaagacgtgtggcaatattcttttcagacaactcttctccagtaaatggagtaatgccaaactcaaaatcgttattgccaagttcttctgccatcggtgttggcgtcatgacatgtcccactgaagtggtatcacctgaagcacgacctggccgccacaataagtttgacttaccaagttgaccagtcgttgccattaatgttacatagatagaatcatcaactagctcatattctttctcgcctttgccaaagaagtagagaccatttttaccgtcattttggcccacagctcgatcaaaaatataaatattaactggcttttctacaaattcatcattccaattatcatctattggctcattcttagtctttctgaaaccgccttgaatttgagtatgagcatattcagtttgcatccttgacctcattctcaatcttaaacgatgagccagcacagtattgtttatatgcagacgacaggataataccttttcgccattggttagggaaacagtcaatttgaatgggacttctttcttttgcccatcttctttcaaacgatcatccagactgtaaggcaataaccatttaccttccaaaatcagttccttataggttgaggtttctttcttggttagttttccattccaattaagtctaatctcgtggtcctttcttagtggtgaaaagtcatacgtatcgccatcatttgcctgatcatagacagagataacatcataatattcttgattcttatctctcaaagtaaatttgccatcttggtaaacaactgtgagttgatcattggcaattgaattattgtccagctcttgcaaactagttaattcttgatcagcgtcttcaaagtgaattaccttgtaacccaagccattcattctaagcttaattaaaacatacagcttgtagtatccaggctcatctttaaactcaaagccgtttggtgtcaattgcatgatatttggtcgagttggagtatatttttctttaaccaaagtagcttcatatttatctggaaatttgatcttttttgaagctgacatgaacgtaattaatttataaccatcaaaatcataaggatcagtattaaaaactatgacatctttatcagttaagttcaagcgttgagcaattctctttttaatatagttttctaagccatcagcaatttcaaaagcctgcttaaatctgtgatcaatatcaactgcaacgttatcagttacactgcctcctaaagtatcgtgtggttgagaatcaaataattgcttccataatttaatcaataatccattggaaacttgaatactcgactttttagcgatcagcatcagaggctctactcgtcttaagatatcttgttcaagcttaaagttcttgcgcttgtttctggatctaacagaagcaatagttctatgcactcttgaataagttggatatctcaattcaccctggtaagtattgagtttctttgaacgaagccgtttcataaattcagggtacgtactaatttgaacatcatttttgctatattgattaatctttttaaccgtatcagagatgttatgaactatattcatctggtcaattcctgatgggattaaaacctcatcattattaccattcttagcctcaaattcaatgcctttgtccaatcgattcttaacaaaatcctttaaatttttctttgaagccaagtcaatctgacctgtatagtatcctaatggaaagttagcagcaaatacaactgaatttcctaatgcacgccacttgaagtaaacagaccctgcttgtctcttaaaattagtaccacgccaagaaagaaaatcatgaattcctacttgattaagaatcattggtaaattggcattaaagccgaaagtatccggcaaatagcctaacatcattgccctaccataatattttctggcatcattaataccaattaccaaatttctcaataaagattctgcagcaggaatatttgcatcagtctgtgtataccaagggccaataaataattgacctctttcaacaaggtcatgaattctttctttagcttctggatgaatttctacatattcatcaatgattgacatttgtccatctaaagtaaaattggcttctggatgagattctagttcatcaagaacttgagtgaataattgatcacttaatacttgagcatcttgagtggtaaaataccattctctatcccagtgtgtatggttaactaaatatgctttaaccatgttttgcctcctatttttcatacccaacgctttgaattattgttcttaacacgtctttggtttcattaattgttttacatttatcaattaaatttctaaactgttgattttgttgcaaatcaactaaaaaagtaaatagttcttgaatgttcggatagtctttcttattaacggaaatcaaaaagacatacttaatcatgtttttatcatcccattttatcggttcattcaatctagcaaagcttacctttgattgagtggcagcatactttatcggatggggaattgcgatcccgccaccaatggccgtagaatatagatcttctcgtttatatacattgtctctaaagtcgctttcaacataatgatacttttctagatcatctatcattagatcaaggactttttccttagttaacttatctttaagtaaataaatcaatttaccatcaaacaagttcataatgaccttatttttatccgaaactgaaacgaggtattgataaagttcattactatcattctgaaagttagataaatctacctgaattactggtaatttactttcataaattggcaccgttgaaattacaaagtcagtattttttaaatcactatgctgatattcatataatgaataaacacccacaatattcaaatattcactaaattgcgaagataatctagcctttagtaacatagcagtagcagttcctgagccgcataccaatgcagctctctttttatcccaacgattgttgtataacctttccattgaagcaccaacatgaagtgtgatgaaagctaactcatccggggataatttcatgttaagttgatgctctataagtggtgaagctgtcactgtcatttcataagccaatgggaaagttgaaacaattacatttagtaaaggattctttctttgtccattaatatttttaactttcagtagtaattccaagtgcttctctaaattacgaattagttctttgtcttgcatgagattgaaaacatagtcgtccttgattctatccaagaactcaatgacaatgtcatgtatctttttgtttttcacgtcattattactatgctccaacataagttgtggataatttagagctaggtgataaataaaataatgaaattctgcttcactatattccaattcatagctacggaaaacttcctcaaaaaacttagaaaccttatcaaaatattcctctctaatgtaagggatatttcgattaaaattacgaagctgattattagttttgctgcgagctaactccaatgctaagtgaatagtgatatttttatcactataatcagacataggaagccccagagctacgattaaattggtaacttttgtcagtaacttgtttaaatctaaatcagaaaaaatcaccttttctgatttagagaaacctcgaacataattattgcctcttttattatcgatataatcaataatgcaactacgaatatccgattctgaacctttcattcttaaaagatcgccatctttttgaatctttagatgatagtttttggctacctttctagcttctttcaaatacttatcaactgttgaatcactgatatacatagtggaaataatgtcatcaatctcacgcggtttggttagaatcaaaagaagaaaatcttttaatcgttttttatagtcgtcaccaccatctgtaacgataccactttctttaatccgctcgaccaaggacttaaacttttctcgatcattaataagtagatataagccatgtccccgtttattttttattgagacatcgtatatcttaagagaattattcaaattcttaatatcgcttcttaaagttctagttgtgacacctaactttgctgctaatgctttaggggaaatataagtatcattatttttagaaattaaagacgttaaaattgattttaagcgtggttgtgtaatagacatgcaaaagtcacctcatttctataaaatgtagcttatcatattatctaatattcataataaatagatactatcttatcatgtgtaagcttaggcaattttactgtattatttactacctctagctttttaagtggctcttcctttaaatctactaattctactttattaggagccttgttaaatttgagttcatcttccttttctttaaatgaagcattgtacagtcgaataacgtatcctttacgctcttctgctttttttactgtactagtagtaaattcacccttcgtttcaaaaagactatattcttcagggagctttcttttgactacattaaatggaaagattaatcttccatttaagaattccgcatattcaaacacttgcaacccagtcttaaattctttggcgacattagttacgtttgctttttcaaaatcgcaatcagtaatatatactccaaaatcaaaacttaagaccttcttcaattcagcagcgagagttgctacagtagcatcccctgaagctcggccagggcgatacaataaatcagcttttcctaatctgccataagttctgaataaggttaatcgaatagttgaatggtgttttccaatatcttcgtactcacgtacaccgttagggaaaatagcaaacatattgttcttatcagataatgaagtataagtttgcattgtattaatcgaaattggcttttcttgccaatcatttggatgttcttgccaatccaatattgccttcttcaattcaaatggtctcttaatgctgccaaattgaatatcatcaattgacccatcagtcactatttgagtatcaaaatcaatacataaacgatggtctaacggttggcgattatctgtaactaccctaaatccaattactgggttatctttctttaactttatctcaagagataccggcattaagacaaatgcttttctatgtgcacgttcatctaaatcagctggcactctaaaatcaaagtcaatcttaagttcattaagcaaagcagatttattagcttttactttaaatgcttgatcggtagaataaattacccaatcttttttagctggtgaatagttataagaatctccatcatcgccgttgtcttctaagatagcttgtttatcgaaaacgcgcccatctgtttttcgggtgattcttaaacttccatctaaatttacttcaattttgtaatactcattttcaatcgtagtttgattgcttactgacagttcatctgcttttcctacattaggaatcaagtaatattgttgatatcccattggaggaatatttttgactactaggctaatctttgttttataaactttttctggctgataaattctatttcctgggtttaattgaacagttgcaccattaacttcttctgtttcatctttaaaaccggcaactacaaagggaataggttttccatctttatcttgaatctcaaaattctgcgctggagtgtatatggttttagtaactaatccactttttgcaacaggagtggtattgaagaccgttaacgtaattgccttgtcgtcaggcttttttatctgaaccgagatttgccgcaaagttagttcaactaaacttgttgccatatctctagcttgtttatatcgtaaatagatatcttcattaacattatctgaaacactatttgccattgaatcatgtgcagaattttcaaacattttttcccagatatcatcagctgcacctttaggataggaaataccaaattgggtacccaaagttaaaacaggttcaagaatgttagttaggtagtcttgaattaaagtattcattttcttcaaatcagatcttgaagaatagtttgttttatgaactctcatattcttaccgatattgaattcaccttttaacatgttcagcttaggtgctaccttatcaactgcagcaatatattcttctaaagaactaatcttaaatttaaaatctttatttctttcatttaatttttctattacttgaggtagattatttctcgctggtgccatatcagaaccttgaggaaaaagaatttggtctgttgttgcttgtttaactacactagcaaagggctcagatgtcataatcttatctaaattattttcatcaattagaccacctatgaaataaccacaggccattcgataaacattaattcgactgccatcttcacctttccaaataaattctgaatgcgtagcttcataattgggaaaaccacgccataaaacagctttatcaattcccaaccccttatagatttgcggcatactagattcctgcccaaacgaatcaggtacatagccaatattcatgtagcctcccaacttactacatattttcattccatataaaagattacgcactatattttcaccagatggcaaaaactgatctgtctgtgtataccatggaccaataataagttttttatttttaacaagattctgcactttctttaaatcttgtggacgccattttaaataatctgcgatcaaagatgcttgaccatctaaaataaagtgattaaaacctacattgttttccaaattattaattacatcttttagatcttttaataagtaaatctgtgcgcgagaggtagtaaaaaaccactccctatcccaatgcgtatgtggaactacatgaactgttttaaccataactaaccttcttttctaataaaaaagctatagccaaatttaaactagaggggaaaagtactttgttattgactatagctttttgtttatttttcaaattaactgatttattcggtagtaatgtctaacttaatatcgtcctcgctaatctttttaccgttgtcttcagtgaagttggcaactaatggagcaacaacggcaataaacaaagcacaggctaaaataccacaaacataagcaggaatattatcagcagttaagatacctggaataccacccaatggaggtatgtgtgaacttactcccattagttcaccaacgccagcacctaaagcaccaccgattacatttacaaagattaattgtggggctttcatccagaatggaatagcaccttcagtaataccgaatgtgccgttgatcaaatttgtacgccccatttccaaaagttgtggagagaatctcttcttaggccaaataaaagtcattaaagcataaccaagaggaatagcacaaatggcaatattagtgtaaagacatggtttgtaaacaccttccaggaagaagaagttaccagcagcccaagcagctttattgacaggaccgcctaagtcaacaccaatcatgccacccataataagagccaaaatcaaaccattagtatggtcattaaccattgttttaatccaagccaacaagccagtattaatccacgctaatggacctgcaagaattaacccattgacaatagctacagcaccagttgttaacaatggagttaagatcaattcattggcagaattccacttttcaggaacattaatatgtttacgacaccaacgagcaacgtaaccagcaatgaagccagctaccatagctccaataaaaccttgttgagtattagtagctaattgaccaccaataaaacctgcacccaatgctggtttatcaccaatggcataagcaatataaccaccaattactaagttgaccaagccaatacctatccaaccaacttggttgacttgatacagcatatggaagaagccagtagctttagcaaatttacccagatcatttacaccacaagccatacctatcaattgtgggataccaacgataagggcaccaccaataattgtaggaatcatgtaggaaatacctgtcatgatatagccttgccaatcatgcattagtttcttaaatttcatcattttactcccttcatttcaaagtagttaaacattattctgttaaactaggcacctttgactacagaaacgcatttcttaagaagagcttctggagcttgaatacaagtattaatatcaactctgataactttctttcccttaaaacgatccattccttcgatcttttgatcagagccaattaagacaaaatcagctttctgggcttcttcaggtgtaatttcatgaactcgacccataattccttgctgctcgatcttaacgttgtaacctaatttctttccggctaattctagtgccttagctgccattggcgtgtgagctagcccagctggacaagaagtaataccaacaatatttacatcactcataatttattagctcctatctttttcctaatatactttgcaatttcttgtgaatcgtttaatgttttcaagttttgcttaaaatcatcttccaataaagcagtcgacagattggcgagcatctttaagtgagtattacctgcatttttaggtggtaccattaatgcaaaaacatctgtaactggtttattatcatatgtcttccattcaataggtttctctaagcgaacataaataataccaactctttccacagcttcagatttagcgtgtggaattgcaaatccatcttgcaatcctgttgaatattcttcttctcgctttttgaatgatcccaacagaccttcaggatcattagtaaagccaatttcttcagcatattcagaaattttctttaacaaactttctttatcagcgacgttcacgtttaaaagaacatcttctttttcaaacttcattaaatcacctctcgtattatataaattgtaattagtcatattgtgataattaatcaaattagtatttgctttttgatcttcacatgttagcctctaattgtcattggctttggtcaactggtctaggttatcacctcctgcagttttgtctgctttataagtctgccacccagacagttcctttatgctctaactcacatgctgtattgattgcttctttttgctagtccttgagcaattgggattaggtgcagctttcaaagaagcaaccagtgaatacttatactggcgagattgaacttaagaactgtaattaggggttaacatgtgaagatcaaaatctatgatcagaaatttgaaagaaaggaggccatttccaatgaaattatttgtcggtattgatgttagttctaaagatttacaggtcgttgcacttgattcagaagatcaaaacaaacgcttaattaacgatagctttgtcaatgatctttatggtgctagtgaactgaaaaaacaaattttagatctagctcaaaataaacactatgatcaaatcattattggcatggaagctacatctatttacagttttcatcctgcttactttttccaaaatgacgaagatttacaaaagctcaatgtagagactgatgtaattaaccccaaagaaaccagcaggtttcataaagtctttgaagaaagtaaaactgatcctctcgatgcttattacattgctttgtatctaagctttggacattatcgagtaagcattgccagacaagacaactatcttgctttagagcgtttaacgcgtaccagatatgaattagttcaagaactgactcgtaccaaacagcacttcattgaagctttatattatcgggttaataaactaatcactgtcgataaagataagattaatactcctcttttcggtgctacaatgatgtctattgtaaccgatagtaaaactctggatgagatcgcggatatgcctaccgaagacttaatttcttacttacaggttaaaggcagaggacgcttttccgatccagataccttggctaaagcaattaagaaagctgttagaggttcatatcgcttaggcaaagtaatgactgattcaattgatgcagtgctttctgttcattacaacatgattcaaagctttaatgaatctattaaagatctagaaaaagcaattgatcgtatcgttgatgcattaccagaaagcaaaattctggaatcaattcccggtattggcaaaacctatacagctggtattatcgctgagatcggaagtatcgatcgctttgataaagaagaacagctggctaagtatgccggcctaacctggaatcaatatcaattgggagatcacagcaacgaacatactccaatggccaggactggaaacagatatctaagatattacttgattgaagctgccaatctagcaagattacatgatcctgttttcaaaaaatattaccaaaagaagtatgatgaagctgtctactcgccgcataaacgtgcttgcacattaactgcaagaaaattagtacgagttatctttaaattgctcaaagatgacaaactgtacaggacaccgaggtcttaatttcaaaaattggtctaaatttaaaagtaaacaaaagtttaacattaaaaaaatcaacctttaccaaggcttagtttcatatactcaaatttatgatcaaaaagaacaaatatcatcgcctttcatttgacttattaccacatgacttgtccgttgggccttctttgtaaccccttacatctaatatgattgcatattctcttctataagtaatgtctcctaatttccacttaaagtggaaattaaatatttataaagttacgtcatgtcctaaatagcttaataacagttcacaaaacatcatatttgcccatgaaaaccacggtcgagtaaaatcactaggatcattaggattaaaactctcatgaatcatattgctaccattggttgtgttagccattaaatacaataaattctgtttttctgctttagtctcttgggttaaccctactaatgccatacctattggccagatatttcctttaggagtatgcggacttccttgaccactccaatattcaccaatatagaaatatggattatctggagacaaaatgaatcttcttgtgttttgataaatgtcatcagtaggtttaacgtaaccaatataaggagcagacattaagctaggaacattactatcatccatcagcacatagttgcctctaccatctacttcataggcatattgctttttaccattgtgctcaacaataccatacctttgaattccttcattaatttcattttgcagtgttttagcctttgcaactatatctgaatcatccaaaatacttgaaaatatttcttgaatataatttaaaactactacggcaaacatgtttgaaggtatccagtatccatatgtacatgcgtcatcactcggtctaaatccagaccaattcattcctgtatatgccacaggcgttcctttacctttattctttaaagtatcagttggaacatcacagtccctttcaaaggtgtagttagaattctcatgatgttgctcagttttaatagttgccagcatctttttaattccagaaacaaaatttgcatcaaattgagctgtttcacctgtgttcttatacagtagatatgccagctgtactggataacagagtgaatctaattcatattttctctcccaaatccagggacccatttttgctttatctgtttgatgaccttgattattggcagtcatattaaatgcattagcataaggatctaagttcatattaaaaaattgccgttttactactcgagtaataatatccttaatgttatcgtcagttttagctaacaataaatatggtcttaattgtgcagatgaatctctttgccacattgccggaatatcaccggttaatacaaagatatttttattttcatcgacctttaaagcattctgcaaagtatctaagaaagtcttgttaaaaattgtatataaacgttcatctttagtgccacattctgcttccacttcattcatataattctttacttgttcatcaataatgtctttcattattttcacccccagccaaattataaaacgcttttataattaaaaagaagacattacttttcaccttattgtggaaaacaaataagccattgcctgtatttttacaaagcaatggcttattcattattaaacggttattcctcacccggtgcagatataactattctcattttaccagtgaaagtgaaattcttcatctcatttggaataattaaattagttccgatcttcaaatcatatgatttgccatcggcttctaattttccttcacctttaataactgaaactaaaagatatggatgatcctttaagccggtcttccatgtaccatcgaggtcaatttgccataagtagaagtgtggtgaaacaggtggttcaactaaagtcttgatttctgcatcttgatccttattagtcttaacatctagcttaggatcaacatgtggcacagttgtaacatcaattgacttttgcgtatgaagttcacgctttttgccgtctttaccaacacgatcataatcgtacaaacggtaagtaacatcacttgattgctgagtctcaataactaaacagcctttagtcaaagcgtggatagtacctgcaggtacgtagaaaaagtcgccagctttaactggaacctttctaagtaatttgtcccattcgcccttatgaatcatttcagccaattcttcacgatttttagcatggtgaccataaataatgtaagcacctggatcagcttgcatgacgtaccaactttcggttttaccagaatcattttctaccttacgggcataatcatcatctgggtgaacttgaactgaaagattatcattagcatctaagaattttactaataacggaaattctttagccttaggattaccaaaaagttcaggatgctttaagtaaacatctcttaaagacatccccttgagtggaccctctgttacaatagaagcatcgtccttgtagccggaaatgatccaagcctcaccgacttttccatctggaatatcataattgaaaatatcttttaatttacgtccgccccaaatttttggtctaaaatacgggatcaaaaataatggttccatttaaaatcacctcatttttactttagctcatttaaaatcatctagaaaggtatggcttttctttcttttgaagaaaaaagatacacttacgaccacatatttcaagttggtttggatctataaaaagatataaattttataatatcagtcggttataaccaattaattatttatgtaattaggatcttatttcgtgaaaccgtaaaatagtttgtgtaaggatgaatgattccttaaatttatttctttaaacattagaaaaaggagttcctttctcgtatgattggtttgaacaaaaaaacacatacagaaagaagaactccttcatgaatgattttaccaaagattttgctcaagctctattcaatccagacaaaataaatgatttattgcgcaaagagctacaacaggctgttaataacttgttagaagctgaattgactacctttctgggctatgatccctatgccagaaatggctggaatactggcaattctagaaatggtgcttatttccgcaaggttgatacccagtttgggccaattgaagtgcaagtgcctcgagaccgcaatggacagtttcatcagcacacgctgcctgactacaagcggcactcggatatcttggaaagcatgattatcaagctatattccaaaggcgtaaccaccagagaaatagccgacttgagtgaaaagatgtatggcagtcattatagtccagcccaagtatcaaatatttccaagcagatgttccccaaggttgaggcttatcacaagcgcaagctaagcgacaagtttttctgtgtctatttggatgcgacataccttcctttgcgccgagaaacgtttgagcgtgaagcagtatatattgccattggcattaaacctaatggacataaagaagtcattgactactgcattgcgcttagtgagaacattgaagtctggacagagatgcttcaaaacatgaggttcagaggcttgatggaaattgagtccgatctgctggtcttctataattatcccaaacaaatcagagcttcaatttattcaaccagcatgattaaatcctttaacaacgtcatcaagcgtaaagctaagcctaaagcagagtttccaactgaacagtcgcttgatgcatttattggtatccaggcaatgagctacaatgaccgctatttcaaccgaattcataaaggctttggtcaggttcaggataccttagaatcctattttgattaaataaataattaaaaaatcaatttgcgagaaagaactatttacacaaaagatttgacagtttcataaattatctatcactagttactacttataagactaacatcttacttaatcaaactttaaacaaaaaaataagaggtgaactacaacatcgtcacgttatagttcatctcctactttaagttgtttgacaaagagtcacattagctagtctctgtctcttactacatacattaatagttaagaagtggaaattaattaccaaagcacctctatttcaatgaacctgggaatctaaattcatatgaactaatcgggcctactatatcaagactagttatttgtttgactaattcttgaaataaaattattgcgttattaacaccataattgtttactattttttggattttttctggacttttaactttttttggattctcaatatcataaaaataatccactttaatatttaaagtcctatattcagaatcattatcattttcttcatttgagcaattggcatgccccgataatgtcacaattgcatcgtttgcagaaatagccacagaaatatcatcaaacataaattccaaatagaaactgtcttgttgctgttctagttcacctttgtattcataattaagtttattaattataaatccattatatttaagctgtactgacatcgttatctcctatttctttaccatttgtggttgaaaaactgatttttttattcccacctgatagaaagacagtgtcttttgtttattagagctttcgtttatcttcatctttgctattactttagaagttttatgctgtaatgttttattatctatttcttttatttttattcgttttcttgaaaaactagataacttatttaaaacttgctgatatttttcttcactactttctaaatcaattccctgctcaacttctgtatacgtgcttaaactcaaacccgttaattttgctgcttcatctctatttaaattcaaactaattctttttccgaaaatcttttgtgataactggaattgatatgaatttaatctactattatttggattgattttattgaacttcatgtctttcgtttctccttcctataaaattcttttccctattattcaccaattgattatgaattagttcagccagtttcccaagttgatcagtaagtaaattcatttttcttatttttctttgatctttagtaggaaatttagtaaatccatatgtccagacaaaatatactttactctcatttaatgtaaataaaattctacagtttttccttacgccttcatttgtttcagaaagaaagcgaatctcatatacatgattttgtgacatcaattttttaacaatctcgtacttgatatatctgttagaatttggaactttatactcatccttaaaagaatatccaataataatcccttcttttacttcgggctttaattgttcaatattaccactactatctaaagtaacatttgaaagaaagttgataattcttaacaccgattcttgaatattaggattaagattatattcatcttctaaatattcttcggctaatttttgctcagacaagttatcatttatcaaatagaactggcgcatgggtcactctcctttgtctaaacattttacgtcaaaatcatgatattttccattctttgttgaactacagtaagtgttaatgtttttgcgatagactatcagccatagtctaaccttattctttagcttcatcaattatatcagcatccccaacctcagcacaaaagaaaaccgactccataatattccctgtcaatagctttttattccatcaaaaaaggaggacatagttctctttgataaaaaatctattccactaaatattttataaataaaggtgatttctatgtcctctcttaatcattgtattaaatcgagcttgacattaaagatgaaaatatcgtttttaaagcttgtttgaattaacaaacaataatgtcttaaaagataccacgccaaaataaaagcgaccttcgttcataagagcaaagaccgcaaacttgttaattgtctcaccacagaaattaacactcaaattctaaccttacattgcactaaaaatcaatacaactctacgccttctcaagcaaactatggtcaatcggttcgccctttaagtgggcgccacgaatgttcttggcaatcattgacttgcgtttactctttttatcgtaaacccagtcgccttgggctgtagtgatattctcaactttggtagtatcgccatcgattctcactaagaatgctggtgccattgttgagcgcttgttagggcctgaagcaaaaccacggtttgtcatgtatgaagttactaatacttctttcttgttgcctttaacgggaacagcatagtatgaataagttgaagttctccagttaaatggaacactagctaccaagaccgctgcgtcgccattaagtggtttataaccataagttaagtggtctgaaacccagccgagcatggcaacattgtcaccgactttggcatctgcttgctgccacaaatcatcaccagtaccacggttcaaacgcgttgtagcaaataaatagtacttgccgttcattggaatgatatttggacgttcaatttcgtcggataccatcaagctgttaactaatggtggtaaaacttcagcaaccttaggattgttctcattcttggtaaggcgaatgataccaatagtagcgttagcccatgttgcacgactcttcatgtcgtcattagcagtcaccttcaagaagttttgtaaaacttgcttaggcgtaccaccatagttcttccagttatagacttgattttctccttggtaattattgctacctgttgaagcttcaaaaattaggtaacgttgaccgccaacagaaatcacatgcgcatcacgcatagcaatattatctgcacctttattggtagacttccattgcttgtatgtctggtagtgatatccgtcgccttggaataaaacatgacggtgacttctcttagctatcgaaattgtgtttttcttcttgttaaccttcagcttcaagttaactgttgcaatcttttggtgattagtattttcacgggtgtctacatcagcgtagaacaattgaatactgccatctttgtttaccgtagctgagcctgaccattcttgatcagttggcttagcattaaaaccaaagattggaccagcacatttccaatggttaagattattgtcattgtacttgttatagagcaaataaatgtgggcatcattttggttagggattcccatcatggcgatcattaattgatagcctttatagttaacaactctaccagtcttagcatcttgtactggccatgaatcccaaatttctagttccgctacttgaccagtttgtgcatcacgcgtaacggttgccggcatgtttttaatctttttagcattaaaatatggtacgcgatattgcgcatcttgatcaatcatctttttagccacgccagcatattgatcatagctccagtgagtactagtatccttatcaagctcattaaagttcaactttcttacttccttaagttggacttcagttaaatccttaggattaacatctgcagttcgcaatacctgaatagtttgaggatctaacttgtaaactactgcgtcgttattttggctatagctagtattactaaaaccattagaaacattatcactaatagattgagtagtatcaccagctacttggttttgagcgttctgatcagtattagtagtatctgcaacaccagcactgtttcgattatttgtattgtcagtgatgtttgccccagtattatttcgcattgtttgattttgagcatgatcagcagctacatcattattttggttagtttgtgcttgattttgatctgatttatcttgttgatcatttgtggtcgtagtttgggtatttctttgttcagttgtaggttgttctactgtatcagctttaactgttagactgttatttatgttaaacaagccaagtaaaacagctgccgatgcaaaggtaactaatgtgcttctcttgttcatctctgttcaattttccttctgttatctcatagccagtttattataatatcttgttcggatttttggaaccttcttaatcaaattgaaatattagccaaataatttctctccatgaaaaaagccttcgctgatggataaaaccgtcatcacgaaggtacgatcattagttattatacaagattattaaaaagtgtagtattttaggacatacttgagaactatttgtgatccgtgttccagcacatctcctgtttatcgccatattaaattagaaactataatagtcttttgtatcaattttttccaagaatatgaaaagatcaaaaacctatgttcaacaaacagctgatgccattagccacttttcctttaaacgctgtctctataatattttcaagaatttttatatatcttgaaacaatttcttgtgctatccaatcccatctcactaaatattcttcaaaatcatcctcaaagtatttctcagaattgacggaatatccactaagtaagttatttttccacttagacttaacgttaggcttctcaattaaccaccatgtaatcactatatagataacggtttctacatcacaccataataaagatgcttcttcctctttcgagcatatgaataacgctaaaaaaacgagatcccatgttgaaagtgtctttttccaaaatcttccagagacaggtagccaatcttcgccatattctacttcatttatctcattattaatatatgaacaaaataaagtctctaaattatttgcagttgcatctcctataattctttcaattaaattttgtttcatttgatccaaagattgctttttcttaatatcttcaattttaaaaatatcgttaaaaaagtccttatattgtgatttcaatccacactgcaagtcaaatccatttcctattacaattaatcggtttatttcatttaaatttatttgcacttctattctttcctcctacaaatagagcatatcctaataattatacttttccttattgtcaatctctttttatcataaagctgtaatgaatttttacataaaaaagcctttgcgatagaacgtatccattaagtgaagggattgatctctctatgtttagaataaagtaatacgcgtggtgctagttaaatcgttctagacaataagccaaattataagctaaaattgcaatttccaaccggctttgaaagcctatcagactacgtgctcgattgttctcggcattgtaataggtcagaagcgaaaagtcgctttcaattgttctgcgaatagccatcaattgatgatcattgtgctttttagctcctgtcatatttttacgatatggtgtccaaagttcgtaacccatttgttttagctgttgatgcagttctttgcctaaatagccttcgtcgccaagaagatagtaattagatggatgggtattttctatcagttcaactgtctccctggcatcatgaactgatgcctttgttacgacataatcaagaatgtaaccgtcatcgctaacaatggcatgaactttgaaaccatagaagtaaattttcttggtggccttataaccaatgttggcataaccgcgaaaaattttagcacgatagtttcgaattggttggcaaacaggtaccggaaagctgtcaatgatcaagaactgtccattcaggtcaacctttttattcatttcttgccgtatctgataaatcaattgcaatagctgacgtgaacgccgattaaaacgtgagtgtgataaacaattgaaacattcacagaatcttctttgtgattcaattcctgtcttagcttgccagataagtaaagccaaaatcagactgtccgtagttttaatttgatcaatatttcgccgatgagtaaactcagccggtgcatacaaacgataccagtgccgacaaattatcactaaatctttaaaactaacttgtaaatggtggctaaaacgcttaagcttaaggcagttcaatcagatcagactcttttctattattactatttacaagtcgagtctaacaagattggacttttttattaactaaaacgatttaactagcaccacgcgtaaagtaatatatcataatgctctatgtcttcacacataataaaaaagagagctaaacgaattgatacaatcccactaaagtggacgattgaaatacataaagtattcaattatccatggaggtgggattttttatgtccagaaaaagtaaatattcattcgatcaaaagatatgggcagttgaacaatacttgaatggtaataggagcagcgttgaaatagctaaacggcttaagatgccaagtaaaagtggagcgatgcaagtaagaagatgggttcatcaatatcaaagcaatcgtgatacccttctaagtaatgctcaatacaataatcattactctaaggcatttaaagaaaaggttgttcaagaatatttagctggcaaaatgtcgttaccttctttagctaataaatatggcattagaagcaatggaacagtatcagaatgggtttccaagtataatagtcatatagaaaatcgggactatgatccccatccggaggtctatatgactaaagcaagaagaaaaactacccagcaagaaagaattcagattgttcaatactgtcttaatcacgacaagaattacactcaaacagctgtcaaatttgattgttcttaccagcaggtttacagctggacacacaaatatctagctaatggtgaaacaggattaacagataaacgaggcagacataagaagccagaagagctaactgagttagaactggctaatcgaaaaattaaggaattagagcgtcagctcaaagaagaacaaactaagaacgaattcctaaaaaaattagatcagttagaaaggatgtgcttgccggacaaccaagatacagacaagccgcaataaaaagacgctggaaacaagaaacatatcagttaatccatgactgccatcaaaagtacaattggaagattgatttaatgtgcaaatgggctaaaatagcacgctcagcttattacaaatactttgatcctaagcgcaagccgagtaagcgtgaagaacgagacaaaaagattgaagcaaagatcattgaaataaccaagtctaacaacagtctgtttgggacggaaaagatgaccatggcagttaatcgacagatgtctgatgaaaagccggtttatcataaaactgtttaccgcttgatgtgtatcaatggcattagatcacaaaagcctagataccagaagctaaagttcaagcatacaacgcctgagaaaacggccgaaaacaagttaaaaagagactttaatgcatctagacctaatgaaaaatggtgtacagatatcactgaagtcgttgctgctaacctgcctaaggcatatctatgtactgtgtttgatctatatgatcgctatcctgttggctacgcaattagtaaacgaaacgatactgctttagttcaagcagcctataagcaggctgttaaagcataccctaatgctcatccgcttttccatagtgatcgtggttttcaatttactcgcgcacctttccaaaaccaattaaaagaccaaggcatgacgcaatcaatgtctcgtgttggctgctgtattgataatggtccaatggaaggctggcaaggcattatcaaagaaatgcgagttattcttcatcctcaagtggccagttatgatgaacttaatgattctatttgtaagacaatagattactacattaatgaagatccacagaaacgttttaacggtttaactgctggtgaaatgcgcaaagaagcgatgaaaggcaatattaagaattgccctattgcaccaaatcatcgaattgagaaatactggcaaaaaatacacgaaaagaaaataagagaagccaaaaaatcctcagctgattattaatcaactgaggaataaaagctttatgtaattctactgtctacttgacagggaatgtatcaaatccagctctcttaagtatgctccacataccaacattcatcatttactgtacattatccactattagctttcaagtgttagtttttatatgtaacaagtgatgtgattaagcaaaaatactaacttatttgtgattgacgagtaaggtcttaataagacatcttaacgattcggaactatcaaggtcatcactaaagacccagctaatatgacttttagttacaataaggtatagaggctgattatcagagacaatgacacctttatcagtataagtagtgtaataacctagatggaatttttcaacatcatatgcactaacagcatacagataataatttttcacccaatcaaacttggtaggaagtgatttaaattgttgctttactaaagatttttcctcttccggaattacatttaaattgataattcgtttactgtcattcaatatggtctgatagagttcgtttagtccttttaactgttccccgttatctgcataaacaatagttgcagtattgtgagctaatgccgaattttgagttacgggactattatgaaggtgatatttcaagttccaactattactaataaaaatgtggtaaaccctatcttgaaatttagttaattcatagcaaagttgtttaattaacagagatagtgtaccttcagaagtcgctttctcaacacttttagtttgataatctcccaaactaaatatattaatttacgcgtggtgctagttaaatcgttttagttaataaaaaagtccaatcttgttagactcgacttgtaaatagtaataatagaaaagagtctgatctgattgaactgccttaagcttaagcgttttagccaccatttacaagttagttttaaagatttagtgataatttgtcggcactggtatcgtttgtatgcaccggctgagtttactcatcggcgaaatattgatcaaattaaaactacggacagtctgattttggctttacttatctggcaagctaagacaggaattgaatcacaaagaagattctgtgaatgtttcaattgtttatcacactcacgttttaatcggcgttcacgtcagctattgcaattgatttatcagatacggcaagaaatgaataaaaaggttgacctgaatggacagttcttgatcattgacagctttccggtacctgtttgccaaccaattcgaaactatcgtgctaaaatttttcgcggttatgccaacattggttataaggccaccaagaaaatttacttctatggtttcaaagttcatgccattgttagcgatgacggttacattcttgattatgtcgtaacaaaggcatcagttcatgatgccagggagacagttgaactgatagaaaatacccatccatctaattactatcttcttggcgacgaaggctatttaggcaaagaactgcatcaacagctaaaacaaatgggttacgaactttggacaccatatcgtaaaaatatgacaggagctaaaaagcacaatgatcatcaattgatggctattcgcagaacaattgaaagcgacttttcgcttctgacctattacaatgccgagaacaatcgagcacgtagtctgataggctttcaaagccggttggaaattgcaattttagcttataatttggcttattgtctagaacgatttaactagcaccacgcgtattaatttttatcttgattttcttttccacatccattttggcagatagactgtttacatcgtctttactttgatggtgcatgttcgttcctttccatattaattttatttcgatttgtgtcatttaatcataatagttctattatatcctaatatagcaaattcgttcacttcactactataggttcattctttcaccaaccatcaaaatatacaaaaacaatactggcctctcaataaaaatgagaagccagtattttgatgaggggaaattatttagttgtacagtttacttactatcttttttatctagtaaaggtttaattggttgtttttcattttgaggaacaatttgaacgtagacatcaacgcctttatcaagtaatcttctgaaacatttgtcttcttctggactagtagaaatatattgatataaggtgtcgcgtccttccttagcacccataccacctaagtcaagttccttaatatcaatgccatgatcgatcatatattcaacagtctcagggactttaactaaaatcatggtaggtgcatctaaaggttgagaaaagaattttacaccatcttctttatcaaaaacgccaataccaatatcttctggtatcgcttgttcaaaaacatttatcataaattcatttttagatgtagcatcatctacaattactacattttgcgctccagtttctttaagccatttagtcatgacttgtccatggataagcctgtcgtctattctagttaagactaagttttgcatgatgtttgcctcccaaagtagtattttcaataccccaatttgttttatctagggcgattttaattaaatcttcaatcttactttgatcatttcgggtagtaataatgcttaatagcattggtacattaacacccgtaataactgataaattatgattttgttttaagtacatagctgtattaaaaggagttccgccttttaaatcaaccaataccaaagttgggttagtttcatcatctttcaaaattttatcaaactgtgttctatattcatccggatcttggccaggcctaaatgacattgtctctaaatcatcggttttgcccgcaatcatttcaacggtttgttttattcctaaacaaaagtctccatgacttgctaatataatttgtatcaaagtaatatctcctttaaattgtggctaaaatacctaagtaagaacagagaataccaacaacgaatattcctacaacgataatacttgcattaactttctttctcaaaagccaccatactaataaggtaatcagcaatggaattaaacttggagcaagttggttaaataatgattgaagcctaataacactttgacctacatgccatactaaaggagtcttaatagttactctagttgctgccatcgtaccaactaccatcaaaccaacaatagaaaaggcattagtaactttgtctaataatccactctttaaaatagatacaactgaagatttacctttcttatacccatacataaacatccagtaaccaatactgtaaataattagttcgaatataagagtgaacataatagggccaaaatagttatgctctaaagccatagtggcaccaatacttgctaaaatagggaagataataccttgttgaacagtatcaccaataccagccgctggtcccatcaatccagtacgaacaccattaatgtcttcagcactaattttagcaccatttgctcttgcttcttccattgaaagagcaataccgtgaataactggtcctaccatatgtggttcagtgttaaagaaaaccatatatttcttcaattcgtctgcttgtttttctttaggatataacttcttgattggatgaatcatcatattagtcaaacctagcgcttgcaaacgttcatagttataagcagattcatctgattgttcccaaagccaagttttaactaaatcacctttagttaatttaactctataaacaacagttgttggttcatcattcttttcattacttggcgtagcagaaacctgatcttcttcaccatttctattttgtagcgttaatctgcgaactttctttttagctggcacatttgtcttagttgtactatttgcttttgcattaatgtaaagtaagtatgctaacagtcctgcaaagatggcgatagccataatttgcaactttaaatatgcagtaaggaaaaagccaacgaagaaatatgggaccaaattcttcttacctaagtaatttaacaacatggcaatacctaaagcgggcatcatagcaccaacaacttcaagtgcaactgttaaactcttaggaatcattctaagcattccttgtgcccaaccgcgaccaaagaatactaaacaaaatgctgggataccatatacaatggtagcaacgattaaagaaggtacataattcaaaaatctaacagctttaatattaccttttgctaattctgtatctgccttatgtacccaaaaagagttaacactttggtaaatttcaaccattaacaaaccaattaatgagaatggaactgcaaaagtaacagccaactttggatttgctccagaaagaatggtcaaagcagtaccgaaaataccggcaaccatagtattacttggcattacaccaccggtgttgatccagcctaagtaaactaattgaattgtggcacctgaaagcatccctaacataggatttcccataaatatcccaactaacaaaccagttgtcaacggataagtcatacaccgagtaatcggcgcgaagaaccaccattgagatatgatggctaaaatagccactaatattgcagacagtaacattttagagcctccactttcttttccttagaaaaaacaaactccttctacaaaattgaaaagcctaatgctttgacatccttattaaatccttgaacagtttgaagagatctttcttctggagtagttccaattaatggaaacttagcaattactggggcagttaccgtgataatatcgcaatcacattcatcagcttgaaatacattaataacttctctacaacttgcccataataaccatgcatttccactttcatgacaaagcttggcagcttctttcattaatggaattggatcaataccaatatcagcaagacgaccggcaaagattgaaacaatattagtagaacctggttttagaactgctaatacatctttgacttgctctaaagtaaagacagcagtcacgtttacttttattccttcattagaaagttttttaattaatggaactgaagattcaccctttgtattagtaatagggattttaacaaaaacgttttctccgagtgatgaaatcttttttgcttctttttccattgtttcgaaatcatcactaaacacttcaaatgaaattggaagaccttttaccttttctagcgcttctttagcaaaactcatatagtctttaacgccggccttcttcattaaagaaggattggtagtaaagccctttacgatcccactttcttttgctttaaccatatcatctataacagcactatcagcatatacttgtacatttaaatcactaagcttcatgatatttatcctccgtgtaatatcttcttgctccttttttgagaaaacgtttgcgcaaataccaaaaattataaacccaccatttgggcttttttgtatttttatgcaaccgttttcattaattacaattttattgtataatcaagttgtgcaaatgtaaaggatgttttgaagaaatataaatatttcgaaaaggaaaaactaataatgtcagtaaattcaattaaggatattgctagattaagtggatattcaatctctacagtatcacgcgttttaaacaatacaggcagaatatcccttaaaactagagaaaaaattttaaagatcgctaaagaaaataactattcacaaaatattattgcaaaagggatgcgtaaagggagtttagcaataattggtatcttagtgccagatataactaacccatattatgcatcgatagtaaaaaagtgtgagcaaaatttctttaaagaagattatctcacaatagtctgcaatacagaaagaaatgctaaattagaagagaaatatatatcacgactgggaaatcatatggtagatggtcttgtcattgtctccacacaacgcaaaatagatcaaaaacagtctgctattcctactgtcttcattgaccgttcacctaaattaacacaaaataccattatagcttcttctgataactattccggtgcagttttggcaaccaatcatttaatagatatagattgctaccctattctcattactaataaaaataatgatttctcaagtaataaaagtcgtataaaaggatttttagacaccgctaaaagtagaggcattactgatcctataattattaatactgaaacaaactctgatgaaatttacttaaagaaggatcaattaaaagaaaaaatagataacttacttaaaaaacataaaaaaatcggcatatttgcaattaatgataatgttgctagctatatgtaccagttagcaattgataataatatttctgtaccttcaaagctaagtattgtaggtttcgatgattcacctatagctaagaaattacaacttactacaatcagacaagatacttctaaaattgcacgagtatcttgcaccaatcttttaaagctattacgccacaaggaaatcttagatcataaatttacaattggagtttcattaattaaaagagctacgacttagtatcaatgtatctatcaatcaaaaaacgatcttcaaataccctcggctatttgaagatcgcaattgcatcagtccacaaactgatacgtacaatgtttgctcttatcaaacacgatcaatgtatgattacaacgtagccacacataacccaaaaactttagttgaaatcaaatgatcaacttcagtataacaacctatgaaaaaactacaagtattcataggtttatttgtggtacttttttgcacacttatgatagacagaaaattctatttaaaacatgggatacgtacgttggtcgctatgtcacagaaacacacaagatgttaaaaaacgcaataattatcaactaaattggaatcagacgaacgatgaaagtgattgtgctttatttaattatcacaatgtagaaaataattgtgtcaagagtttagcaggctttcaacaacgactagaaatagttactttataattataatgtatcgttcaaaaattcaactagcattacatgtatttaactttctttcttcttattactaaacttagaatcatcatcttcatcatccaaatggaatggaactacagtgtctttatttttctcaatcggtttaccttgtctcttaatttccagatcaaattcattagctaatttacctctttttattttttcacattcttgtttattttttaaattatgtaacttattatcggaatgtcttctcgctacatcttgcgcccactctactaatccctccttttttaaattatctttacctacaatagcatttagaagcatctttataattgctacggctccaccacttactgcagttggcccaataataactttagttatacttattaaatcggaaaaattacttgtcaaaaaagtcaggtaaccaggcgaatttacatccgcttttaaatcaatatttttttgcttttcttcaggcaaaactgagactaatctataccagtcatacatgcttaaatttccgccatgacttgtatatactcgcagataatatttatgattatagttataaatgggtgacaccaaattaaataatttactcttgtcctgaattgacaattttgcagtagcttgatgtgcattcattatccatgccaattctttaggaagatcctgtctacttataacagaaatccaatgaatttttcgtctttttctgtaatcagaacagggatacacaatatcttcattttgcatttgctttattcttttttgaactacatctgcattttcatcataaggtttacccactatcacacccagagcaaatttatatgatttttttgctggagttaaaaccaaatctcctatcttcattccaaaagcaaataaatatgtctgttttgcatgaacagttaattgtcttctagaatttaccggtaagttatcaatagaaatttgattttctttagcatattgatcaaacataagatctttaattgcatcgacagatataatattttcattagctaatttatttaattcatcaacagttatacgattatatctaatgccgatgtaatcattatttacaaaatcatcgtaatactttccaccatctgctctaattagccaaaaatctatcttatcattaaacttaaatacaatatcatctgagtcattcatagtcatcattaaacctgtctttataaaattattatattattaattatataacaacagacagatttaaaaaaagcttgattaaacatatgtcaccaaggtacaacaaccacacataactactccttatctatcccaccgaatcattagtattttaagctcaaccaagttcctctctttgactattatcattcctatttttgatttagtatctcccccaaaaaagggatagacttttttcttcaacattaatcatttgttagcaaacatgatcaattggtgtgtcctctaagtgaaatatactaacggaccaatttgccaaataaatttttaattcattcctattatcgacctcaatcccagtttatttttaatcaaaataagagatgaaccacaacatagtcatgttacagttcatcccctacttcaaattatttaataaaggccttattttctagtcataaaagtagcatacttagaaacgtcttctttcatttgaatgttatatgtcggtgaagtgtacataatagtgtaatcactacctggcaagaattcttattacatctcgcttacttagcctttcaacagctatatttaacactggagttaacagaattaatacaatataactagtgataaaccaatattcatcaaaaatcactagaaaaactgaaactgtcaaatcttttgtgtaaatagttctttctcgtaaattgattttttaattatttatttaatcaaagtaggattctaaggtgtcctgaacctgaccaaagcctttatgaattcgattgaaataacggtcattgtagctcattgcctgaataccaataaaagcatcaagcgactgttcagttggaaattctgctttaggcttagctttacgcttgatgacgttgttaaaggattcaatcatgttggttgaataaattgaagctctgatttgtttgggataattgtagaagaccagcagatcgggctcaattccttcaagcctctgaacttcatgttttgaagcatctccgtccaattctcgacgtttgcgctgggagcaatgcggtaatcgatgacttccttgtggccattaggtttaatgccaatggcaatatagactgcttcacgctcaaacgtttctcggcgcaaaggaaggtatgtcgcatccaaatagacacagaaaaacttgtcgcttagcttgcgcttgtgataagcctcaacctttggaatcatctgcttggaaatatttgatacctgagctggactgtaatggctgccatacatcttttcaattagatcggctattttcctggtggtcacgcccttggagtaaagcttgataatcatgctttccaagacatccgagtgctgcttgtagtcaggcagcgtgtgctgatgaaattgaccgttgcgatcccggggcacttgcacttcaattgggccaaattgcgtatcaactttgcgaaaataagcaccatttctagagttgccagtattccagccatttctggcatagggatcatagcccagaaaggcagtcaattcagtttctagcaagttattaacagcctgttgtagctctttgcgcaataaatcatttattttgtctggattgaatagagcttgagcaaaatctttggtaaaatcattcatgaaggagttcttctttctgtatgtgtttttttgttcaaaccaatcatacgagaaaggaactcctttttctaatgtttaaagaaataaatttaaggaatcattcatccttacacaaactattttacagtctcaaaataaagcctatctctagtttaacttagaaataagctttattagctaaattttataataatattttattcttttaaagaaagaggggaaattatttactattcaactttagtaattctatttacaaaatcattgtaatttttgctattaattaaatctgccactcgtttatcatcaataactatagtagaaagatcatcaaaaacttttctaaattcatcatcatcttttgaactataagctaagacaaagactaaatatattttttgtcctaaccaatctactcccttgggattaatataaataaaccattgactaaatttagaatcataatcaattgcatgaggaattgcaactaatccaaatgctgtactagatattttttctctttcaagcaatttattttcaaaatctttaccaactattcctgatttactcatcttagtagaaagttctgcaattactgctttgtaattcttatgtttattgtctatatagaaattattctctgaggtaaattgttttaatcctatccttagcctttgagatcttagaactaatttaatttctctaattactttctgtagtttggtaacatcattagataggaaaaaactagaaacataaacagtattaaattgtggaaattgttgattcgaatctactacaataattaactgcgtttgtcttaaaatttcatttacatctgataccgtatcaagaagaagcaaatcattaccaaaagaagaatttatttgactaactaatctttgaacatttccatggtaatcactcataaataactgacaaattattttattttctttttgaatttgttcagctactgaattgcccacatgtaatgcaataaaggctatttcttcttcattaatttctattccatacgcctcattaattgcatatgctattaaacaggcacattcataaatcgttggagatgattgtttaatattattcatcagcggattatgaatagaagaactacttttatacctttcaattaacctgattaaatgtggtaaaaatctcttcttaaacagtttttcatcaagatttagattataagttctacgaacaaaaccgacaatttttctaaatagatcttcaattttatcatcatcttttaattctattttttgattagataataataggaacatttcttccaattgccgaacatcactatttgaaagaactactttttgcttattttttatccaattaactatatcatttactatctctaaattgcttgtggtaattgataaattgtcattacctcgatcaatcataataatagtgtgcagtaacaaattattgaaatcgaagtcatcaatcttaaaattatttttttcaagatatttattgagtgcctttttaacggatctaacatcaattgttttaaaattattttgaataattttttcggttaaaagtgttcctttcaattctcgatagattaaagcagataataatttacgtttattcctttctgtacctattacttcataattatcgcccatacgattcaaagtaagactaaaatcacttaactctacttctaaattttgaatttcttttcttaactctacttcattaatatatagtgtttctgataaatcataaatattaacagaactgtctgcttgaagtaagtgacgcagtagccagactttcctttgagaatacgtttgtggcaaaataatagtgctgttttgttcaaaagaagctttatcaccttcatatctgtatccttgtgaactactttttattttaataccagcctcacgaagacttttaattttatttttaattgtgcgctcagttacacctaattgcattgatagcatttttgcagtcatccaggaagaactattttttcgtaggataattaataggtcattattattccgcatcgttagatctcccttctacatattattcaagattagaatgcatttctcttaacttatgagcatttatatagcctttctttaacattcgcaaaatcaaagtatcaaacaacagcaaagaatactgttcatacaaagatcccatcggttgaatagatccagtataactatcttttgattgtgcattaattattatcatcttatcgctcttcttagctaaaggcgaattttcatttgtagtaaaggtaataattaatgctcctaattttttagctgtttcagcttgtgaatttaataaagttgatgtcccactggctgaattaaaaatcaaaacatcatttttcgaaatagctggcgcagtaagttcagaacttaaatgagtatctaagccaatttgtgttaaccgattagctaagcccgcaatcatcagaccacttctaccttcaccggataaaaataatgttttagcatttaaaattatttgaataatttcatccatcttattaacagtaagtgagcatgatgtatgttgcaattcattactaatagctttaaattcacttaacacatctaactaacctccttatttaatctttcaccaacgtcaccagaaggatgattggctaaaaagttcttcttattaaaatttttctttttcattaaaatgcaagctacaacatcaaataatgaaatgacagctaatgagctggttgttgctaacatattaaattcatctatttcttgatcaacttttactttgacaatcatattagctgctttagctaatactgattgaggactttcggtaatcgttataatgtatgcatttttctttttaatattttcaataaaacttgttaattccttagttgatccaccttttgaaatgaaaattactaaatcttgcgaatcaacaacacctaagctaccatgtactgcatcagatggatttaaataaaatgatctaacaccaattacatttaaagtatgagttgcctttttagcatccattgcagaagttccacaaccagttaacaaaatgttgcctttacaattttttattttttcaactagttttaaaacatcgttattagaaatagtatttgctaatttaataatctcttgtccttcttgtcgaaacaagtctatgaaattatcatcactcattatttatcacctataatagtaatagaaatatgacgttctcgctttcttgtttgatcaaaatcagcgaagaaaatctgacctaccgagcctactaaaagttcagcatcttttattcctaatgaaacatttgagcctaataaatctgctcttaaatgaccatcagtatttaacattgtccatttaacagctggataattagggtctgtttttttcattccatatgcaatatgttctggaccaggacttagatatgggtagttttccgtagtttgtctgggaataatcttttgcaaaatatgattcaaatctacttgtaaataatcatcgccataatagttcttatcatgcatgtactcatcaaaataaattgaacaagtagtatgtgtggtttgaactagacaaattccatttcttatcccactatctttaacagcctttttaacatcattagtgatcatatgatatgaaggacgtccttcaaccgtttcaacagttaattctttaaagaaagtactcattcttctatttccttctttacttcattccaaacttcatctgcacccatgccagtcaataaagcaacaccgttaataactctatctttaatctcatcaggaacaatggttgtactgataacaatgtcataatcattatttttaatattgtcgacttcttctgtaacggcagattgtttaatttctacttgatcttgcaaattattctcctcaagccaattatttactttagcgtgaacaatagttgaagtagcatgacctgcaccacacataattaacatctttttcataattacttaccttcttcttgatttaaattatatttcttaacaacattgagatagaacaataatcctaaaagaacaacaattaaaataatcaaacctacaacgcctaaattttgtgacatccaaatccaaattgcatttgtccataagccagctaattcaaatgaaaattgaccttttgttgcaatactgtagttagccaatttgaatgtcttcataattaatggactcatccaagtagctaaataaagcattggaatagaataaatcgtagcaccgattaaacttctaacaatatttcctttaaatgcaccaactaataaagtaaatacataaacataaagagttaagtcacctaatggtaatactttgtttcctggaagaataacagccaggaataatgaaataggaatcattaaaacactagtagcaataacagcgggatgtcctacagttaaagctgcatccataccaacattaactttcttaccatgtaagtgtttctcagtaaatttctgagttgctgaagaaattggtgtcaaactttccataaacatggaaatcatttttggcataatcttcaaaacagcagccatttctgcaccaaattgcaacgtctttgaaacatcaaatccagctaacaatccaatacctacaccgacaattaacccaataactaatggatcacccaagataccaaaacgtttttggatcttttccggactagcatctaacttattaaaacctggaatcttatcaaataaccaatttaaaggaacagctaaaaaagtagcagataatgccatcatgtgagtaactgcaataccaggtaatttaaagaatttaccagtaataggttgcatcaagtcagccataaataattcaagtaagaaaccacctgcaatcgctataattgcgtaaatataattattagtaactgcccaaactaacaaaccaataaatgttggttgccataaattccaaatatccacattaagcgttcttgtcattccaagccaaattagtactaaattaattgcaatagttaacggaatagccaaagctcctaaggacgatgaaaaggctaaaggtccaccaacaccacaaccaacatccataatacttaacgacatatggtatcgtgcaaccatcaatttgattgcaggctgtagatctgcggccatcatattaacaaccatgtttaatccaacgatcaaacccaaaacaattatgataattgggatacctacagttgatcctaaccccaaaaaccaatgtagagcttgtgcaaacatttttatttctcctaacttaatttaattgataatgttttaaaatcttttcaacagtattttcattatttgcatgaatcaaatcttctactgcctgggaatgttggcacatattcatcaaattactcaataaattagcctgttcatgaggctgactcatagcaatcataaacactaaatttacctctacttctttagttgcatctaccatattcttaaagacgactggcttttttaaagaagcaacagcaatttgtgatttattaacataaattgaatctgtatgcggaatggcaattcctaagctattttctactggcaatccagtaggaaactttttttcacgcagcaaaacatgattagtaaaacttttcttcactatattcttttgagttaaaattttcgctaattgagtaattacatccgtatcacttttagcatccatacctaactcgataattctctcatcgaaaaacaccttagctcctcctttccttacgtttttatagtaagcgctatcatccgataataaaaaatctatttttcaccccggggtgaaaaatagattttgcttcattcaattttacctaataatattatcacgaatagctaaggaaaggagactattaataatggttaaaatagcaacatcattacacagtggccctaaattacacatgagtgaaattttagatcaattaaaaaaggcagatgttgatttactacatattgatgttatggatagcatatttgttcctgaaatagattttggttctaattttactaaagaaattagtcaatatactgatattccacttgatattcatatgatggtaaataatcctagtcgcttaataaacgaatatgctttatctacaacaactgatattggcattcattatgaagccacacaacaattacaccgtgatttattccaaattaaacagcttaataaaaaagctgaggtaattataaatcctggaacaccaataaattcgctatctgccgttttaaattttgttgatcaaattatggtaatgtctgttgatccaggatgcagtggtaaatcaccattcattccagaagtggcaagtaaaattaaaaagttaaatcaattaagaaaagaaaagaattatcattatctaattgaagctgacggtggaataactgacaagaatctaaaagtactagttgataatggcttagatatagctgtatcaggttcttttatttttaacggggatattagacaacaagttcaaaaattaaaagaaataaaataatagaaatatataaatattcattcaagaaactatctactaaagcctgttaataacttacataagctattaacagattttttattgcattaaattcgagctgaatatatcattttcagctccatttcttgattatacgatctctgagatccacacccttaatctagtttaattgaaaataaacatttatgggcccgtttgacagtcgaattcaatattccattctgttgtcgacctcaacctcaatctaagtataagaaaaaaggtagataaaaacatcgtcatgtttctatctacctttatattttagggtgtttgacaatgagccactcttctttgattataaaatttctcacttcattacttatattttataaatttatttttaatccccttcattatagaaattatggtcgcattatttaaaaatattaaaatggcaccataaattacaacggaaaggattatagaaaataaagttttgaggaaaaaactttcccatccaatatcacacaaccaacaaattaaaacaattccactacaacccaaaagtgatgataataaattatttctaaaatttcctgatttaataattttagaaattatatctctcgaaaaataaagattagatatcatcatgctagcttcagctgcaactgtagataatgctgcagctttttcactccaaaatggaatcaaaataaggtttaaacaaatatttataattgcactaataactgtaccaataagtacaaatttttcacgtttgattggtattaaaacacaatcagacattacccagctaaataaagaaaatattagagcgaaacataaaatttgtaaagatggagttgctgccaaaaaagagcgacctgagataattaaaacaacttccttacttaacataaacaagccagtcattgcaggtaaagtaaacaaaagtagcatatttattacttttgttagtattttattatattcattcattcttctttttcccattagcattgccaatctaggaacggtaactattaataaagaagctaataaatttttaataatagaatatatttttgcagctacactatataatccaactacatatgtatttttcataattcctaatatagttatatccgaatttacaaataccataatagcaacattagaagcaaaaataataaaaataggtaataaatgatgtttccacgggatatcccatgttaattttacttttacaaacatccgtgcatgtacaaaattaaagatatttgaacctacgcttgaaaaaactgttattatagcataattaagataatcattcttacttcttacaaaaataaatagcaatattagggaaattatttgaaaagaaatgctacgaacagttatatacgcataatcttcatagattgaatatacccaatccattccaagtgtagtaaaaaatatttgaacagaaaaaatcaaaatacatgacacataatcatgcaaattagtaaaaattattaaacaggcaaaaagtaagatataagaaacaagagtggaacaaatatttattgtaaaaatttcactagcaaattcatttatttgctttttatcatctctatattttgcaccttctcgaatcgcataagtactaatccccaatgcagcgattaataagaaataactaacaattgaatttgaataattataaacacctatcccctttactccaagtactcttgatacataaggaaaagtaattaatggaaacagtaagtttaaggtgctttttaatccatttaaaaaagcattcagccccaatgatttatttttcattttgcttaaactttctacttaaaactcctacataccctataaatttaaaaataggataacaatattttaatgagaaaatttctattttatatctattatttaaagctgcataatccttatatctctttatataggaatatagttttttttctttttttatatctcttaaatttagtctatgaaaataagaaacaatactaactattgtttcttgatgaaacttatgtgctaaatcaggatattcatgctcaaaaaaatcttccatttcataatgagaatgtgctgaagcccccaaatttttcacggaaacagtatgaattaaacttccttttctctgtctataaaaatataaggaactagatgtcataaagaatatattagctttattatataatttataaacgattgccatatcttcagtgaagtctcttgtaggtagaaacaaagtattagaaaatagactttttttaaagattttattccaagaaaaagaagcatatttaggattaatcaatgttttcattgcatcataacgattaattttttcttttacgagagtatcattttgatatatatttgttacctttttttgaaacatagtaagttgaaatagaaaaacatctaaatctgtattaatcaaaaactgtactaatctctccaaaatatttgtcttaattaaatcatcactatcaataaaccatatccattttcctctacttttttttaatccaaaatttcgagtagccgaaacgccactattttctttatcataacaaattatatgagaatatttttcactatatttctttataattttcaaagaggaatccgttgagccatcatttattaccaaaacttcaacttggcttaaatcacttgaaataatacttttcaaacaatcttcaagataatcttgtacattataaacaggaataataatacttaaaattggcttcttcataatattatgattacctttcttaacatttgttagctttttacattaactgtaacttaacacaatacgaaagacctttgatttaaaatcattctcccaatattgaattattataatttgctactgccatacttataaaaacaatagacatttctaaatatccatctattccacttgccataagaaactgtaaaaatagtatactcattaacaaataagcataaaatgattctctagctaagcgataataacatattaccactattataattcctaaaattcctaattccattagaattttaattaaatctaattccaatgttgttccattgaaaaagaagttattctgtaaaaatttagtagtagaagttaatccactagacaaataattattttgaattaaataccacactctataagctctactcatagaaaaatctactatatcaaaatgaaatctatctatttcccaattataatttaatggatttaataaaaacatatacaattctattaataaaatccacattaaagaactaatatataaaatccattttttgatttttacctttctaaagaaatttgtcgatgctattaacagtattaatactcctaaaatatagacacgtttaaagattaaaaataccattatcatagatgctatggtccagcctggaaatttatctctataataaatgaaaaaagaagctaaagtaaaagacaaaaatgatattttagaattttcaaacggagaatatgaatttgaaaaagaaattgaaaatatatcttttaatgttatggtggaaaaatctgtactaataaaaaaagcaactatagataatagtaatccaaatttcataaacatttcaatatcatgcatagataaaaaatttataaatataaaagcgtacaaaaaaggtacaaaaagtcttattgcttcacctggaaaaaaattaaaattagcatctacttgatatgctttaacatttgaaatgactataaaactaataaataaaaatattcccgttttcaactctgaagtatatttcattttatttttattgaataaacattgacataacggaataattcctacagcaattggaagcagcataaaaatgtaaacaatcaatgtattagcatcacttattacattaatataatctaagaaatttccgattaaagtaataaaaaaagatgtgagtaacaggattcttgttttaagatcaactttcatttcttcatatcctctatcattcagtctgttcatcacagtattcaacaaattcttcgtaagaagaaaactgataatttttatacagtaattgtttacttaactcataattatccattaacttcatctgcgctttaaattttgtattcaagtgtgtaggtttaaataaaaagaaatattcgtttaatttttcttcaggagggacttttccaaatctctttttatattctcttacaaaagtagcagcttccttaagttgattgcattttctcttgttgtaatattcatcaagtgtcattaattttctagctggatttccagcataaacagaatctgaatctacttttccagaaactacactattagcacctataatgacgttatttccaatatctgttccccctaatatagttgctccccagccaataaatacattatttccgattacagttttacgttgacttccgtaaatatatccatactttcttttgatcacgctccaactataatcgtgattaagaatagttgcaggtcctgttatttgaacgtaatctcctatcgatagtaaatgcggtgcttgtacatcaatagtagtattaaatggtctataaatttttacgcctttacctataaacacacctatttttctcaaatgtgctatataactatcactagtagccctataccctaatactttgactttaatccaatttttcacattcatttttctagtcctaatttaaagattaatagtaatattaaagccattcgtttttgtatcaatttcaaaaaaatacgttgttttttatccagtttatcaataggataactttgaatagcttcttttaacatcgagtttttgcaaatttttcttatagtatttaaacctttataaaatccattatttttttcttgtgatatgctcgatcttacattaataaaaaactgctttttcagcctattaatcgaatcttcggataaattattttgttttacttttttaagcaaatacgaatacaaaacaacatataattcaaatttattaggccaatatttatgtgacagtgagtctggattaaacctataataatactcagcagaagaaactatttttaccgattcggaatattgaaagtaatctaagtcccatacaatatcttcagatatatactttctttcagaaacgaaatgcaacttgtttcttttaattaattctagagaatataaattattccacacggacattttgatactatcatttttcttaggtgaatttcccaacattttttccataacattttcttttacttctttgccaaagaaagagttaggtttataatttttcctcaaacttatttttccagtatcatcgattcgagtataaccgccaatcacagtatcatattttccttgaattaagggtgcaatcaatttttttaaacacataggacctaaaaaatcgtcactatctacgaacataacatattctccacttgcatgttccataccataatttctcgttaatcctaatccactattatttttatgaaacacacggatataactatacttttcagaatatttatcacatataattccactgttatctgtagagccatcatcaatcagtataacctcaaaatttttatatttttgattaacaattgaatcaatacattgctctaaaaacttttcaacattatatactggtacaattattgatataaaaggagtcttttctttcatttttacgatattattcataatctacaagctatttattaaatgatttatatctatatatttattttttccaaatggttcataagatgctcttatgaatttatggtttttgggagcctttatttttattacatttggaaaatgaccaaatttatcgttaactgtaaaacaaattttatttctcatgggtaaatttacaaagttcctaatatcttcttctgtacagccattttgatcattgaatttatataatatatgatcccactttattctttttattcttctattccatttttctaaaacttgctttttagaagaataatgcataaagaaaatttctatatcgtccaatcttgcaaccggatatgtaccataaccaggggttaactttagtttctcataatagttagattccttaggatcaataaattttaaaggctgatttaaatattgttggagattagaaataaacttaatataatcagatgcccacaaaaataaaccgaccgtaggagattgcttaattaaattataactttcataaacttctcctccccaacaattattagatataattgtaaacttttgcttatttatttttttttgacgatacttcgcaaaaaactttcttcgaaattctaaaacttttaatcgtattccttctattgtcataacattttcctataaaaatttagtactttacaaacattcttataattatcgtatcctctattcttaagaatacttgaatatttcaaagaacactcatatctgtctaataccgtaacttcttttatagcatttacccatgcatctatgttagttaaatcaacatatatattattttcacatagatcggtttcaacagataccctatccgaaacaatattttttaaacctgatgcagaagactctattaacacaaaaggttgcccttcaaatcttgacggtaaaaggaaaagatccattgcagataaataatctgatacattagtaacatttccagtgaatattattctatctttcaaattatatttgtctacttctgcctttatattccctaaatcatcaccttcacctataaatattaatttataatcattaggcaatctttttaacacatgaactaagaaaatctgatttttttgataattaaaataccctacatgtcctaataatttttgattagattttatacccaatttttctctaatttttttacgctgttcaagagaatacttatatttatctagatcaatcccattccttataactgtaaatttttttcttttaaataaccattgccccgccgcatcgttacatgctaatcttccattaacactgtattcaaatatgggacgtaataatttattaaccaagagatgctcagtagttgtattatgactatgtgctatccttaacttcactcctgctaacttagcggcaagcaattcaatagccattgtggtactatttccatttacatgaaccacatcaaatttttcataagaaagatattttcttaattttataaaatagtttattagattagaacttcttccatttatttcttttaaatgaacaccattattttttaattttttcattaagttactctcaacttcattaggtgtaaggatagtaacatcaaaatttttctttactaactgctttgccacattaatgataaacgttgatatgccattggcttcgagattaacagtattaatcagtaaaattttcattctttcaccaaattgttcacaattttctctactttttcattaaaatttttattattactgctttcaccactattttttgtcatagcaatttgatcataattatcaacagcttgctttaaatcatcaatattataaacaggaatgatattattcattctttctacaattaatttaacaaaatcaacctgatgattattaacatgctcatgaaacttttcttgtctgggtactactattggtactttgccaaattgcaaagcttcaataaagcttgacggaccaccatgagtaattacaattcgagcatcttttaaattttgctgcatttcatcaaaagacatcattttatgcgcttcacaatgcttgggcttatatgtactaaaaccagtttgcatgacgactttttcttgaattgcgccatctgcaactaaatcatcaactttttttattagtcgattaaatggctgctcatgtgttcctacagttacaaatatcataacttaaacctcccacactaaataagccagtaatctcttgatcttgcttggctttaggcttctatattatttttgctagttttctttaacaatttttgcatgtatttgggtaaacgattgataaagtcagccgtgaattcagctatttgtgcttcactggcatgaaagacttgctttacgctggccagcattgcatcagtaatcaattgcaaggaatggctaaaagtaatgtccgccagctcatcaatcatgcaatagaacagctcgcctagcgtgcgttcatcttcatcgtcccgcttggcaactgacataagcatgtagcgagtaaaaactatggcaacatgagcggtcaaagcatcgtaagacaggccatgatattccgtacttagttttagataacttttgcaagttttgaaaaaaacctcaatatcccaacgcttgccgtagttgcggataatttcatcttcgctaagcgacatgtcggtacaaatgattgccagccaatccttgcgattggcacggtttctaacgcagacaatccgtgcatctattttagcaccgtctttgtcctggcgtccgactttgactgggattgacagcaggtagcgagaacggccgcatcgctttttacagctgcgataaatctgtttgatgtttttgcgttctccctcaaattcatatttgattttggagctaaccttaaccatggcaatcacatccagcttcctttgcttgagctggacgatttgatgtggatttgagaaccagctgtcaaacagcacgtacttggcttgatgacctgctttcatagcttggtcgattaaattaaccatcacgtctgtgcctttagtccgggcaagcatacgtctttggccagcaatggtgcgctgatcaaaaactttattttcgccaatcatattctgtagcttctgagaagacagcagcactgaattgattggcatgaaagaagctccatcagtccagcccagggtcatcatgcgaaaacctttcttgtaagtcattgatacatggtcaaaaactttggcgactaattctgttttcttgaagccggtcctagagaagtaggaatcatcgacaacaaagcaatcagcccgtttttctgaagtcaaagatcgcaagtggttattaatgatttgcgcagacagaagtgtggtgaagtggagccaattgacgtgaacgttgcgcataaaacggtaatatgagttcttggaaaaattttcttgaaaatgatccattttcagctgcatatataagctgcggtcacgaaagacattgcttaaaacgtaaagaaacaagctgaacaggctaatgcctttttccttgcggaagccacattttctcaacagcttgatcacctgaaacttcttgatgaagctgatgattgagtttgaaaatagttgttcattttgttggtcaggagatggtaaaatagacattggcacaagcctttcatgcaaataaattatgttttggtcaatataattatagcaatgaaaaggacttgtgccttttatatttgtcaaaacacgcagaatcacaatgaaacaagcaattttgcgtgtgggaagtttaagtcataactaaaaaatgctccctagattaattgccttaggataaattttcttcatttcttcccattgcactatgaatttatcggtaattgggtaaactaatttgcctgttacagtcggtttatcataccgatcaaatacttcaatatagactgttttagcccccatcaatttaccaatataaaaaaacggaaccgctactgcagccccacttgaaataattagatcaggtttttctttatggagtactttaatagctaaaaaagtgttttttaataaattttttagattccggttagtaggataataacatccatacatcttttcacccttaagtttgcttcgagcgtcttctttatcaaaagttacccaaaatctagttttattctgccaaaaaggtttcaacatgtataaatgtgtcaagtgaccaccactcgagccaactaaacaaactttcatctagcttttctcctatcaaatctcatctaatttattcatttgatcatcaaaattaatattttcttttaatacattagtttcaatcttatttcttagtctataatttacatacatttcttcaatactactagccaaactatcttcatcaaaattggcaattaacccattccacctatcctttatttgttctctaaacacaactaaatttgaaactatgatcggcttatctaatatccttgcttccaatacagataaaccgtatccctcatgccttgaaaactgaacatataaatcacaattttttatgtatggatatggattatccctacgtcctagtaaaaagaaattattattcaaatttagctttcgtattaagctctccaatttttgtctatctttgccctcacctatagcaaaccacttaaactgtatacctttatcttttaatattcttgcagcttttattgaaacatcatatcccttttgttcagttagtcttccaactgttacaatattaaagacattccttgtaaactcttcaggatagaactctgtagatttttttaaaacattttttacatctattacgttgtaaaaaacgtctgatttttctttatatttaggatacatatcgttaaatgtatcttttatagctttagatacaccaaatattctgtcataattaccaaaatattgttctacatttcttatccacggcatccgctcatcatgaagccaaacagcctttttacgtgccctaacgttcaatgccaaaaaagctgttgtaaatgcaccataaccataaaaatcaattgcaatatcataatatggtagagaaggcatcctactatgctcagctaataaattataaatgggtaaatatttattaagtttgattttttttatgatttttccaggtaaagcatacattgaagctaatgaacgataaaaattattatcaaactttatatactcaattttaatttctttctttaaacgataactatattctgtatcattatctaacaaaaggagagttacatcatatttacttctatccaaatgattcagaaactctataagagcaacttccgatccaccaccaccgagtgatttagcaactacaagaagttttttcataacttaatacgctccattaggatgaataaccaccccaattgtcttaataatcaacttcaaatcttcccagcagccggaatggttgatatacacaatatctagccaaaccatctcgtcgaagtctgcctcactacggcgtgttacctgccatagaccagtacaacctggcatcacaagcaaacgttgcttatcgtagtcagtgtactcagctacttcacttggcagtggtggacgaggaccaactaatgacatgtcaccaaccaaaacattccaaagttgtgacaattcatcaagactatacttacgaatcgtgtgtccaatcttggtgattctcggatcattcttgatcttgaacattgctccatcaacttcgttttcgtcttctagttgatctagcatttgatccgcattaaccaccattgaacggaacttccacatcttgaacggcttctcatctttaccgattcgttcttgagaataaaatgcaggaccaccatcttcatgtcttatttttattatcaaaaataaaaataacggagatagtaaaatcaaccccaacgcactggctagtatatcgaataatcgcttaatcgtgtgatacactggtcgtccgttaacttttgcaggattaacttgtagtttctccattaccatcatattcctcttaccctctgtttgatttagtctatttgaatacactctcttattaatcttatcacgtttaacgcaacttagaagcaaacttgcatatttgcaccaagcattaaaataaccagaactttttcttctgctttaatgggtgccaatccatctgaactgggtcgccattgatgatacttctagcattatcttgccactgctgagctagatcttgactgaattcttgactcatctttttataagcttcactcaattgatactgccgtcttggcaagtcgtgtgcgtcgctggcaaaggtacatccctgccccgccgcaatcaacttgcgcgacatttcttcaatcttattgccaaaaatccccgtataagaactagcagtaatttgcactagacacccttgttccagcatcccttgcaaaacttctggttccttcaagatgcggctattacgctctgggtgcacaataatcggcgtaatcccgcgctgcatcaccttgaatatcgtgtcctgcgcataagttggcacgtcatcacttggaaattccaatagcatataagttccatcttcatcgcagaacaagatgtcatcattatcaagcgcatcaattaagtcacccgacaagcgaacttcctgccctgggaaaaccgtcaacggcaccttggcctcatctagcttctgttggtagagatcagtcagccagatgatgtcatccttatgattagtgtaacgaccgtttagcgtatgtggcgtacagattgcatgcgtcacgccgtctttgacagctgcgttagctaatctaattgatgttgaccaatcctttgagccatcatcaatgccaggcaagatgtggcagtgaatatcgactaaaaccattattgatcgtcactcttttttctaccgaacaggccctttttcttctcagcgccatatccataaccatagccatacccgtagccgtaaccatagccaccgttttcagctctaatgtcgttcatgacgtagcctagaatccgagccttggcaaattttaacatttgcactgctctagtaatcccagccttttgcgtaacgccttgacgtactactaagactacgccgtcaaggtgactagccaactcttgcgtatcggatacttcaagaacaggagctaagtcaatgataaccatatcataatgtgacttaaccaattcaatgaaggtttccattctgcgtgaaccaatcaattcagctgggtttggtggaatcggaccagaagtcaagattgacaagttatcaattccactttcttcaaccacatcatttaaattgatttcgtcagcttctgaagtaagaacagttgtcaaaccagtattgttcttaacgttgaacgtactgtgcaaagttggacgacgcaagtcggcatcgattagcaaggtcttgcgacctgcttgtgcataggtgatcgctacgttggccgtaacggttgacttaccttcactgatattagctgaagtaaaagctaaggtactaatttcttcatcaactgccataaagttaatgttagtccggatagttctgaattgttcagataccgcactacgaggatcagcaactgtgattaatttggcaccatgcttaattgtatcgtcggtaccacgcttttttctaaataatgccatttacttctcctctcctatactcgacgacttctacgcttagggccattagaattcttattcttttttctaatgacaaatgatgatgacacatggaagtgtgaaacttgacctaagttaactaaacctaagttatcagtcaagaatgcatcatccttaactgtagtgtcggacatttcacgaattaagactactgcgaaacttaaaaccaagccaataacaaagccagccaaggtaaagagtttcacattaggtgatgattgattaccatcagttgctggcgcaacgatcgtaacgttgttaatgttcatgatgttaggaatttgatctctgaatgaacgcgctacagcgttagcttcaacctttgccttttcaagtgtatctgcagtagcagaaattgagaagacctgtgattgttgttgagtattaactgaaacgctcttggctaattcgctagtagaaacgctgtaactcttaccgctacgttcaactacttctggttgagcctttcttactaatactcggcgaccctctgcattagtcttgtacttagcaggtttagcctttttaaccactctaactgggttagctaaacgattagaagcatcttgcaaaataacgtgactagtcacgatatccttataggtagtaaccatttgcatgttagcttgttgcgtattgtatgccgcattcgggtcattcttattagccttttggttaaccaagatctgtgcattagaagtatactttggtgaaataataaaattagcgacgccccagccgactaaagccaaaccaacactccagataatcaatgcccagatgtggcgacggcaaatttgtagcaattgagtaagatcaattgtattttcagtttgcttttgctcttgttccatttaccttttcctttaataacgattaacgattcataatatagctggccttattagcagctaccttaacatgtggcaattctagcgctgttctgatcttatcagaaactcgttgacgctcatctttacttaccacttcaatttccattgtgccaaacttaggattctgagtttccttacttacaccctgagcatgatcttgagaaagattgttagtggcttttctataatccatagcaatcttgtacatttgattcatggtcaagtcagtttgcatctcactagaaatggaattcaagaaacttgaattaagcaaagttgaaggtgaaacagacttcttaagcaaggccatgattaccaaacggtcacgctcttgtctaccataatcctgacgagggtcaccatgacgaagttgggcaaatgctaaagcctttttaccattcatgtgataagtctggcctttgacaaagctataacccatattgttgaaagttaatggagaagttacatcaatccccccaacttggtcaattgccttcttcaaaccacccatattgatcatgatgtagccgtcaattggaacactgtaatatttatcaagtgtcttaatagtttcactaactccacccaatgtataagctgagttgatcttggttacaccatattgtgggtaatctgggaagattgcatttgagtcacgtggaattgaaacaatgcttgtactattagtcttagggttgattgacatcatcatgatggtatcagttctacccttccagtgacgacccatggcaccagtatctgtacccaataacaggatattaattggctttttctcattcagtaaattatcaagagtacgtcctttattactcttggtagtcttagcaacgggagtgtacatgttttgcgtcgtatcacgcaaattcttatagatcatcccgcaaacaaaaagaccgactacaatgatcacgccaataacaatccaaaaaccgcgccagaacttacggtgacgacggtggtgatgatggcgatgacgatgtatcggtttattacttgattctgcgttattttccaatttaatcctcttaatcttataatcgttactattatatactcaagaacccattttgaccacccttacatgcggcaaatacttgaggtgatgtgcgttttattgctactgaaataatatattatcggtagatacgtaacatgcaaataaaaaatgcatccctcgaaaaatggaatgcattgctgctagattgagtttaaacggaattatttttcatcttactatcgccttgccttaaattgtactcacactgtaccatatttagtaagacctaaataaccaaaaagtattaagaagtacattaaatagaagttgaatagcatgttaagtattgaagaatcaatcaaagaatttgaaacatattttcagggtaaaccaaatgaagttgaagtagtatcacgaactataaaacaaaaaagtagacggccacataaaccgcctactttatcctaattgttatgatgatcacttgagttagttaaatcatcatttttagttagatcatctatatttccaactactccaccaaatagtgtaaacacacctattccaccaaaaatactaccagccaccgaatgcctttgcatcaccaaaaaagcagaaatacaaatacatagaattgttactattgatactactatcagagatgtccatgcgagccaacctcttcttttttgacgagcaacttctaatctccgtctatgcctactttcttcaacaccattattaattatttccttagcagcattcggatacaatttttggtatccctcaagaatatcaggaagcggaattggtccactatacatctcaagataagccattatttcttttttggtttctttaggcatctcagatttttgaatttgatcaagaatctgttcatctagcgaatctttatctgactttttctttatatcattttctagctttttacttggcttttgatctgccataagatattattccctttcttaagtcgtcccctatcctttgccaatcactggcaatagctttttcctcagcattactattactagaatatatcaacttgtttaataatttgacataaggcatagctacatttttcgataattttttaaacactaattgaatatcggtaaacataattctcacctcattcataatctctttctttattaaaagtatacttaaaatttgactcgtggtaaagattattcttctacatgcaatccacttctttccttattataagcatctgtaatacaataaacttaacagcaaataacgaggtgtttttatgattgataatcaacctaaaaagacaaaagcttatatcgcgggcgtaaacttaaacgaccaaaacttcgactactacatgaccgagctggccaacttgactgaagccaacaacatggaagtagttgggcaaagctttcaaaatgcagaatcaattgtcgccggaacttacttcggtgtcggcaaaatcaatgaaattagaactatggctcaaggcttaaaagcaaaagttttagtccttaatgacgaattgactcccgtacaaattcgcaacttaggaaaattaaccaaaatgcgagttattgaccgcacggaattaattctggaaatttttgccagccgcgctcgaactaaacaagctaaattacaagtgcaactggcacgtttacaatatgaattgccgcgtctacatccctccgagaacaacttggaccagcagcgtggtggtggcttagctaaccgtggtgccggtgaaagtaaactagaattgaaccggcggacaattggcaagcaaatttcggctatcaagaaggaattgaaggctgttgccggccaggaagaaatcaaagcggcacgacgcaaccaaagtcgcatccctaaagtcgctctcgttggctacaccaatgccggtaaatcaaccacaatgaacggactattgcgtgaattttctaaagaaggagcctacaaggaagtcttcgttaaaaacatgctttttgctacgctagatacttccgtgcggcggatcaacttgaaagacaactttagcttcattctgtctgacactgtcggtttcatttctaaactgccccacaacttggttgaatccttcaaggctaccctgcaagaaacgcgtgatgctgatttattaatcaacgttgttgacgcctctgacccgaacatggtccaaatgattcggacaacacagaacgttttggatgaaattggcgttaaggaaattccgatgattaccgcctacaacaaggctgataagactgatcgcaattacccacagatcgaaggcgacgacattctttattccgccatcgatccaaaatcgatcaaactactggccaacttgatcaccaagcgcgtttttgccaactataaaaagtttgacttgatcctgccactaagcgcaggcaaggaactggcttacctgcatgatcgcgcccaagttttacgtgaagactaccaagacgatggcgtccacatcgaagcgaacatcgcgcccgacgaccaaggacgctttcgtcaatatttggcctaactcgattaggaaaaaatatgaaaaaacataatctgctgttcctttttgccctcacatttttgttagttcctactaacacgcctgtaatggctgctaaatatagtgctagtgagtcaaaaaaggtgcgcacttttcaaaaaagctatcatcgtttgagccagaagaattacaatcagactacgctctttaccgtgcagccaaattttggtattcctttttcagcaggagtgcttgaccctgattacatcaaaacttcaatggcttatgtcaattattaccgctcattggttggactgcctgatgacgccaattatgctaatgataacgttaacgcacaacttggtgctgcagcgctagcttcagttaacgcggagcaaaatctgcgagcccatggtttacaaggttacgtcaagcctggctatatcagtgatactgactgggatacagcggaaaatactacattgggcaatatcaatttttcagaatcaactagcggaaccacggctggcgagatcgttaccgatctgatacgtgaagataataatattgcaggtaatggcaacatcggtcaccgcggcatgatcctctcgacgcgagccacccgaatgggaatcggcgcagcttatggcaccgaaaacaacgtcttgtattctgttgaacatggactatttgccgatgatattttgcgccagcctgtaaaaagccgaatcgtttatccagctgccggcgtttttccttacgaattagttggtggtaaaacgccatggtcttactcaacaaccgagcgaatttctggtcagccgaaaatttacatcacggatttgaccaccaagaaaaagcggcaagcgacgcaggtgcgcaacttcggcactgctctttatggtgacggctacacaacgacaatcacttaccgacctggcaaaaccaagttgatcagcacgcacaagtaccgtgtgcaaatcggcaaacattatagctacagtttcaaatttttcaggcaaaatagcacattgaaaaataaacagattgtaaagcatcgaaaatgaaatacgttgatatgcaaaacggctcaagcagttgtacatcctgcttgagccgttttagatagtaacaaatattgtagtctgttcaacaatcttcatgtaaaataatactcaggtctattgcagcggttagctaccgctaagacttagtaattttagcatggctacacacccctcaagattttttaagttacggaggtggaagcatgcataattgggtagactggagaagtaggcttacaaatgattgcttgggctattgcgtatgcgataacaaaaaaagctaatcacaaggattagccgaaacaacagtcatcttaagttacgattggagttagcgaccgacactcgctagctccttttcttttattattttaatatgatttagaatttattgcaatgtttagaagtgcttattctacgccaatgacgtaacgcatgatgaatcaatagcttgttgtaccaagcataattgtgcttcatataattataggcggtggcaaagttatccaattgtcccgccgcgataaattgattgcgtgtccaatgccaatcctgagtaggataatacaaaattttcactcggattacccttcctactgtaataattgcccgatcatgatgataacgcgtgcgagcaacattgaggtagctaccaattaaagtattgcgccagtatcgattatgcagataatttttctcccaaagtaaggccttgcgcaataccttagaaatgcagtaccattcgcgtttgccgttaggcaattcaaccaaacaccaaagatattggtgtctcttcgccattcaatccaccccttctaattaatatcggctttaattataccgctactagctattcagttagaaaatcaataatgtcagaaaatattaggtcatgatgtcaaatctattcaactgacatcatttgtcctaagaacgcatttaccgcttgcttaatatactcgctgcaaaggtgagtatactgcgttgaatttctggacatggctctgcttaaacggtcttgatgggtgtcattttaatccttctttaatttttactataattttctccacactgaaaactatggcaaaaaaagtagaatttttcagtctagggaaaacttttatcaatacaaaaaagcaagcgcattaatcgcctgcctaaaagtattccaaattacttctctatagtactctcttagcaattgatggtgtaaagtaactcgataccgtttgcaaaatagtaccttgctctggtgttgctgcatttacatattgattgtttcctacataaattgcaacgtggtatggagctgtcgttgaaccccagaagactaagtcacctggctgcaagttgttcaatgaaacagtttgaccaaccttaacttgatcataagttgttcttggtaagttcacgccagccgctttttggtaaacatattgtactaagccagaacagtcaaatgaatccggaccttctgcaccccagacatagttcttacctatctgttgtttagctagcgcaacaattgaagcggccttactagtagcttgcgttgaagaagtttggttagtattttggctagtcttcttgattgccgtattaacaatttgcttagccttcttcaccttagctatcttttcagccttcttctgagtagccgttttagtagctactgccgctgtcttcttattaacagtagtctttgtctgcttagcttccgttttcttaacagttggtgcttgcgatacttctgctttttctccagcagtaacatctacggtataacgcgcttcaatccattcacgcgttccaaccttgtaccacaagttgcccttcttatcgagtgcagtctcagctacattccagaccgtgccgtccttagcacggtagcccatgaattgaccattctcatagttggtccaaatattcaggctcttacctggtaaatagctaatcttaacttgcttaatcgcagtaaaattagctgcacgaacagttttcattgatgtgattgcggaaacacccgtaacggtcagggctgcagccgctcccactttaaaaaaattatgtttcataattgaatccccttggtagcgaaacaggtgaaaacttttcacctaaaattacccactcttactatgtaacgccttcattattgcatgtcctacctcaagaagcaaattagaacattacaatattacaaaaaagacggatcactggaatccgtcttcattacttactatcttaatttaaaacacgcttagcaacacttgggtagaagtatgaactcaaagtttgcttgattacgccttgacctggtgtagcagcgtggatgtattggttgttaccaacatagatacctacgtgatatggagcacttgcactaccccagaaaagcaaatcacccggttgaagattatccatagaaacggttgatccttgcttaacttgatcataagtagttctacccaacttcacgccagcagcgttagagtaaacatattgtaccaaacctgaacagtcaaaaccgttagttcctgtaccaccccaaacataggacttgcctaattgtgctgaagccaaagtaataactgctgaagcatcaccagttgcttgaactgacttcttagcctttttagctttcttaactgcttgagccttatctgaactagcatcaacagtatattgagctaaaatccattggttatcaccaatttggtaccatgtacggcccttcttatcagtcttggtgtcaaaaacattccaagtagtaccatgttgagcacgttgaccagtaaagtggccaccattgtagttgtcccatatgttaattccataacctgcaatgtagttaatctttactttggtagtagcagcttgaacagtagcattagttgaatctggcttgatgacatttactgcagctacaccggtcagagttaatgcagcagctgcggtaacttttacgaaattgctcttaatattcatcaaattctcctgtatgttttcactatatctataagcattcttagaatttattacttaagctggtaacgaaaatattaattcatcgaaaaatctttaaatttctttaatgtatttaacaaaatctataataatgccccaatgttacagtagtgttacaaaagtaatactgatttaataaatattacgtttccgtcaaaaagaaaaatagctagggagatttccctaactatcttaactagatatcttatttttaggaagactaacgcaattagtcgattacacgcttagctgatgatgggtaaaatgaagctaaggtttgttgcttaacattttgaccaggagctggagcgtgaacaaacttaccgttacctacgtagatacctacatggtagttaccccagaataataagtcacccttcttaagcttcttagttgaaactgaaatggtcttaccaagagtaatttgaccgtaagtagttcttggcaaaattttgttaattgcattcttgtaaacgtagctagttaaacctgagcagtcaaaaccgctaggacctgcagcaccgtaaatgtaaggcttgccgatttgcttcttaacaagcttaacaaccgcattacgctccttagtagtagctgattccttcttaactgaacttgaatcaggattggtagtttcaagatctgaaattgagttgttagtattgatagtagtgcttgaaacatcatcagcgtgaacagctggaacattgatcattgaaataccggcaaagaatactgataaagctgcggtgtattttactaaagtacgtctaaaattcaaaattaattgtctcctctaaaaattactaaatttgtttttgatttcttaaatcagttgacggtttatataataccgactgaatgttacacgaatgtttcaaaagagctaccatcgcgttaagaaacatgttaaaaaaacagattttatgtaaaaaaaggagaagcaaaatgctagcgaagctttgctacaagggcatcgagcgcgtttttagtttctgttaaattgtcgttaactaagatatgagcgtattgcttcaaatcttcaggtaaagcatttaattcactgccgctaagtctttctttaatcttggatggatcatcgccccgctttaaaaggcgctgttttaactcttctttagtagaagttgtaacataaagaaaataagccttgtcacctagctgtttaatgtaggaataaatgcccttgatatcgacaattaatgaaaccagatcactttttttccaggccagattcaaagcttctcgacttgagccatattgataagagccgtacttaatatgctcaaaaaagtgcagctgggcaaaagtttcatcggtttcaaaatgataagaaacattctgctcctcgcctgatcgcatcggccgcgtggtatgcgttaatacgcgtggaataccatatttttcagttaaatattctgaaacagtcgtcttgccagcaccactaggtcctgcaataagaattatttttttcaaaacctgattctccccacttgaaaatgttgcttttttataatagcattcttgtgttataaaagactaagactttttctcggaaggaagatacacataatgaaaaaagcagacgtaaaagttggtgcaatcgttggtgccaagtcagaagaagaacttaagaagccattccaaggcaaagttgaaaagatctacgaaaattccgcattgcttgcaattacttcatacgatcccgttgacaccactgctatcagcgacttgaacaataagatcgtagttaacttcaagaatttaaagactgctcgcgctgccaagaacagcaagactgcttcaactaatgaagttaagattgaaaaaattgacaagaagaacgacgataaaaaagaagcagacaagaagtaaaatttgacaaaaatagcccgcgcaatgtttacgcgagctatttttttgcctaaaattaggacatcgatacgagaggaaatattttatgaaagaaaaaacgcgaactgttttattttggtttattttaatccagccctttttagacctttattggttctacaacggtaaattagcggaagttttaccatttactctacctacgattatccgaattttagctgtttttgtgattttctgtatgtttttcagtcaaaagcaaaattggcaaaaattagggcaagacaagtggttaattctatatttagccctactaattttgtattcgattattcacttaatccacgtcaaaaactttaacagcattaatcctaatgactacaattattcaaccgtaagcgaaattttttatctcattagaatgcttttacctctgatggtgatcttttttacaaaagaattgaatttcagtcaggagcaattcagacacgttatcgaaggcatcagcggacttttttcatttacaattgtcattaccaatctttttgtcatttcgcttagaagctacgagacaggcccgattagcgctaatatttttgaatggtttgttaaccccaatatcggttactcccatatggcctccaaaggcttcttcaattttgccaacatggtatcagccgtactctttatgctggtgcctctgatgctttacttcatgttcagtcgttttaactggaaaatcgtcactttgaacgtagttcaagctttagcgatgatcgagttaggaaccaaagtggccctcatcggtttaatcggtggcgtgattatcagtattttgctgtatgttttccacttatttattgttaaggatgttaacaaaaacggcaaagccattatcgtggcgcttttaatcgaagcgggcacctttgccatcatcccctttggtccagcaatccagcgctataattatgaaaaatatttggctcagcaatccgatgattctttgacacaggccaagcgagaattaaatgctggcttaaaaaaatatcctcaaggtaaacagcgcaaggaatttttaacgaatttcatcggcaatcattatcaagattacgccttaaataagaagtttgtttttaaaagctacccttataaatacgatcctgaattttggctcaaaatcatgaacgagccaggcaccgctagaatgcaaaatcgacatgtagaaaaagcgatgcttgatcaagttgtgaagactaacaataatcgactcgacaagttcctgggcatttcttacacacgagaaaccaacattttcaaccttgaacgtgatttcactagtcaaatttattcacttggttggatcggcatgctgttgttcattgggccttatgtcattatcctgctctacgctttaattaagtggctaatgaacaaagaaaagcggacttatttgatcagctcaatgttgctttcaatcgcctttatgattttcgcagcattctcgtcaggtaacgtaatggacttcttaacagctagcttcatcctggctttcgttgaaggcagcttgttagctagcgtaaccagaaaagaaaattaaacataaaaaaagttaggtagttgcttgcctaactttttcttagtttttaaacattatttttcttgcttaataaagcttgaatctggcacccgaattaagtagtaccgagttgctaaatgacctgcatgcatcccgattccattttgccaattccgcttgtacttagccgtataaattgccacgtaagcacgttgatactttttatccattttagccaattccttttttacataaggaatcttctccgcattcacgtcaagcgcagtgttaccataagcaatcgaagcatagtcactaccaatcgtgaccttgctgccatcgcgataaaaagtataagtttgtgagccatatctcttcttagcagaattaatcgttacatagcttgaatttcccgcacctgtacgcattatcagtggctcatacttcacgcttgaagtaatgcggtttgcatcttccaggtctggattgtccataaaagtctgattaaacatccaacctgcagctaataaaagtactacaatttccacaatattaagagccatattcggccaactaaagcgtttatgctgtttgataatcatcttaatccgtctttgacggatgttctggacgatgaaaactaaataaagaatgatggcaacccaaatcaggatcccaatgatattccagctgaacatatctcgccctgctatataaaacatagaaacatgcagaagttttcatatttctacatgtcagaaagaaatatattttcctttctttgtcttatttactgctgtcttcatcagtattccgatattccatctggggagtaatcgcattgactaactcttgcagcttaagggcttagccagcccattgtttttattttgttaacgctagtaaatttaatactgcattgtcatcacgatcattgctatagccacattcataacaaatgtattcattatgcttggtgccatgttttttattgccctgcagagtaattttgtctgcaccagttttgacatagccacaattggcacatctttgtgttgatggatatgttttatcagctagaattaattctttgccataccattcacacttgtaagtcaagacttgtctaaacttgccaaatagtgacctttgcatgcctttggaggctacatgggtcatcatcatttgtttgacattcaagtcttcaatgacgatttggtcataattgtttacatgctcagtggtaaatttttgcaaaagatcattctgaatattggctgctttgcgataatcacgctgaagcttggttctcacttgcaggtaattattgctttggcttgccgatttaccgttaactcttctctttttagacaatactctttgataatgcttgattcgcttgtacagtttctgtagttttgctggcaaaacattaatcttgccttcagtgtagttgaaatgcccaacgttgacatcgatggcggtctttttgccagttttagcctttagtccagcctcttcttcataggaaagggcagcgtaataatgtcctctttctctaaagatgctggcaattttaacctcttccatctttaatgcctcgtatgctggaatatcaaaccaagatttaatccctctaggcttatctaatctaagcttgccattaattatcttggcgcgatcagttttaaagccttgacgtggagctttcttagatttgaaatgcggcttgccccaatcaggctgggtcttgtcaaagaagttcttccaagcattagccagatccttgactgctaattgcagacagcgagcagacaaagcaaattgccaatcagccttgttattgactaattcatcccacactcgatgctcattaggactaggattattatccttgtctaaagtccaagcttcatacatgtcttgccaggttgctaaagctagattccagcagtatctgcgatagttacaaagacgttcaagttctctttgcattatcttatttggccttaattcgactacctgagttttgatcatttgtttcacctccaatgcaaacataagtttagcaaaggatgtaacaaaaacaagcgaacaaaatattaaatttttagcagcagttaatttgcttctatgttttgcctttctgaacaaattacctgtatctttttctatattgccattaaattctatatttcagctaaccatttaatcctcctttttttcaattatatggtaaaaaaagcaaaatttgaataggataataattgaatacttagttaaatagtgagaagatcttactagtacattagatttattagggaacattatggtagcaatagctttttattcaattactgggcaaacggaacgttttattaagaaaactcaactttcggcccatcaaatcgacgatgccaaccctaagtatgatatgggaaaatcttatatcttaatcgtaccctcatatcaggacttcatgatggattcagtcgttgattttttaacgtataaagataacaaaaaaaatattatagggattatcggttgtggcaaccgaaactttaacgacctctttgctcaaactgccaaaaagatcacggcaacattgaaagtgcctattttgtatcttttggaatttagtggtactaaccaagatgtcaaaaatgtacgaaaaatcgtacacgatctttctgctggtgagagtactaagcaagtccaaaagcctaaggaattacgtgggaatatcagctttttgagtgattttagagattaaatatgactgaaaaatattacaaagcaattaactggaatgacatggaggaccgggttgacaaatctgcttggtcccgcctgaatgatattatctgggaaccccgtaatgttccagttagagaagataaaaaagaatttttacaattagacaagccggtgcaagatgccttgcttcacgcattcggagcactatctttttcatctggactccaaatgaaaaatgggctagagcaaattaaggtagatgccatcacaccagaggaagcagctgtgctgaatgccttgcaatatttggaatctattgccaataaaggctacagctacgttatcaacgagttgacggactcaaatatagcaaaagacgttattaactgggctgatgacaatccttacctgcaaaagaagattcggattttgaataaaatctaccaaggcggggatgcactacaaaagaaggtagctaacgttatcctagagacagctctctatcattctgccttctacgctccgctttatttattcggacaaggcaaaatggtacgaacagctgaaattgttaagttagctttacgtggcacttcatttagtgggatttatcctggttacaagttccgcttaggctaccaaaaattaggtaaaactgagcaagcagagctaaaagaatggatcgataacttgtacgatgtgctaattgataatgagaagaagcacattgagttaatgtacaagggcactgactggatcgatgatgttacgcactatctctactacagtgtcaacaaggcctacctcaacctaggtttttcagccaagtatcctgacacttctgattcaatcaaccctattattgaaaaaggggtcatcaagaatgcagtgcttgaagacttcttcttctacactaacgatcactcgctgactaagtttaaagaaattaaataattacaaaagacgcaatcgaaaattcggttgcgtctttttttacttcttagtagttttcttggttgcctttttagtagcggttttcttttctgcttcctttttttcaggcttcttatattcacgtattgtggttagcttttcaataattgcctccaccagttgatcaacaatcttcgctggatcttgttcgatctctacttcactggctaattgatcaattctaaagcctgaaacattaacgtattcagagcgcgtttcaaagtaaacatttaaaggatattccttaccctcttcaaagaagttagcaactcgtttgtaattgctataaggcaaattgataatatttgtctccaaggcaaaagtagccggccgctgacccgtcactgctagttgcgtttggatcaatgaattatgcttaaaagcagcgataacttccttgaccatcttttcagcatacggcttgattttgctcttcgacttgctaatgtcggcatatttaactgtttcaagatcttgaatataatcttgattttcaattttttcgttgagatcttttaaattaatttccaaaataaactttcctttttcattggttataattacaaaatactacaaaaaaattttttgtcatcctttttaaggattcaattcagtatttttagctttttatttgttaaaatgacactatgaaaaagcaaaaatttgatcttaagtatttatttttactcattcccattacgttaattctcattataggattgatttacctttttaacaaaaataaaatcgataatgaaattaattggatgacaatgaaggaagaacagcggctcaatgtcccgctagaaaatcaactgcccgatctacccaacggctgcgaggttactagcctatcaatgttactgaattactatgacattaaggttaacaaatatgatctcgccgataatattgctcatgttgattctttcaccgacaacggtaaatatcgcggcaaccccaatcaaggctttgtcggccatatgtctgtcgctaatgctggctggtgcgtttatcatgggcctttatttgacgttgcacgtaaatataccagccacatagaagatgcctctggcagcaattttttagcgattctcaagttaatctccgatgggcatcccgtgctgatcattaccacaaccacttttaatcatgttaacaatatgcaaacatgggaaaccaatactggtaaagtcaacgttacaccgtcatcacatgcctgcgtgatcacgggatacaacaagcaaaagaagcttgtctatgttaataatccttacggtattaaaaaccaaccggttaattggcataacttagaattgagttatgaccaacaaggacgccaggcactttacatcaaataacaaaaaagggcaagccacgaaggcttgtccttttaactcaaggcacatgctcaaagcatatgtggacgtttaaactgttcacatcagtgcgtccaacatcagcacttcccgtgcttgccacttaaggcggatgtcctctatctcataaatatacgcatctcgcgttcattaatcgactcgtcagtcagtaattgtactattttttatgtttgatgtacagtctagcacttttaaaatgacgatatttaaatttataaaaaacttcagtacacatagtcgataacatgaaacctaaagcaatagcaccagtaacaattgctactcgtagaagcaaattctctccttgactataatcccccacaactaaagcacgtactgcttgataagcaggcacgcccgggactaacggtactaaggcaggaatattaaagaccgtcactggactttttttaatgcgtgcaaaacacaagcccaaaatacctatcaaaaaggcgccaattaaatttgaaatcattcgcccaaatcccaaattaaagcaagtccaatatgccatccagcccactgtgccactgactcctgacaggtgaagatcgcgatgcggtacattaatagttaatgcaaaacccaccgaagctacataagaaaaaatgacattaataataatttctaaccaaagtggcatttttatactcctatgaatttaagtacaagtgcaactccaccgcctaaagctaaagcggttaacacagcctcgcacattcgcataatccctgataataaatctcccatgaatagatctcgcaaagcattagtaattgccaagcctgggactaaagtcatcagagcgccgatcaaaatattatcagtaatcatttgtggattaaaatgattgaataatactgccaagatccccatgaccattgctgcaattagctctgataaaaaacgaatcttagtatattttttaaactcataatacgaccaaaaaccaacagcccctactaaggcagcacctgggaaatcaacccagtcgtaattatccataaacaaaaccatcaaggtagcagacaatacagcagctcccaatacctggagccacattgggaaagtaggtgcttgtgatactaaagcaatcttttcttttaattcagaaagagtgatttttttaactgcaaattggcgcgacaagtcattaacccggtctactaattccaaattgatgttgcgatcacgaatttgtttcatctgacttagcttgccaccatctaagctcatgaaaacacaggttggcgtcgcaaaaacacgcggatcatcaattccggcattgcgagcaattctgagcattgtatcttctacccgatacatttcgctcccgccttcgatcattagtcggcccgcagttaaacaaatatccattacttcttgataaaattggacatcccgcttctcagacatagttttagcctcagttcatagtttcaatatcgatggtcttgtcgacccaatcaccgcggaaaaagtcacgttcgtgactaacaataatgactccgcctgggaagttaacaatcgcttttctcaaagcatccttggtatcgttatccaagtgattagtaggttcatcaaggaaaagcaaattagctggttcaaactgcatcttagctaattttactttttcctgttccccaccagaaagttcctttagtggactcattgcttgttgtgcagttaagcccatgcgtgccagcgcttgtcgcaattcctttggctttttgcgttcaaattcttcttgtaaatattggagtggagtcatgttgctattaggccaggttagatcttgcttgaagtaagccaactttgcagtaacagataactcatatgaaccataaattggctttaattgccctaacaatgtcttaagcaaggtagtcttaccaattccgttaaaaccagtaatcgccactttttcatccccaccaacagagaaattgaaggctgacttgaccaaagcatggtcgtaaccgatgaccaaatcttgcgtctgtagcaacaaattagaagcagtcgcaacatatggaaattcaaagcgtgccttgcggttgttttttggcggtgtcaaaacatccatccgcgccagctgcttttcccgtgacttagcactcttagcacgtgtacccgccttgttcttgcgaatataggcctcagtcttagcaatcttgcgttgctggttagcataagccttcaagtaggtctcacggttggctgctttttgccgcaaggcttgcttcaacgttcctgtataacgagtaattgtgccaaaatcgatatcgataatgcagttagtgattcggcccaaaaagtcataatcatgactaacgacaataaaggctccagcaaaattgttcaaatagtcaaccagccaatcaatatgtgaaacatcaagatagttagtcggttcgtctaaaaccagaacatctgggctttgcaacaacaactttgctaaaattattttagagcgctgaccaccagataacttagaaacatcgtgatcatagcctaaatcagctagtcctagtcctgaggcgacttgttcaatttcagtatcaatatcataaaaattattttcttctaaataagtctgtaccttgccggctttttctaacagggcttcgtccccgttttcggcatatttggcatacagatcattcaactctttttctttttgaaataattgatcaaaagccgtccgcaaaaagccacggatagtcacaccaggtgccaatttagcatactggtccaaataaccaacatcaattttattttgccaagttacttgaccatcatcgggcaaaatttcacccgttaaaatcttgattaacgttgacttgccaacaccattttgaccagtaacccccatatggtcttctttgttaagcacaaaattggcatcttcatataaagttttatcaataaaactctgacttaaatctttaacagttaataaactcatttttcatcccctattatttagctgattcatgttctttttcataattttggagtgcatcaagaacacgaggccaatagcgcttaggtaagatcagttgcaaacgatcatgataaataggaaaatcacttgcttttagccccgtaatcttagctagctcctgatctgtcagcttatatttataaacaatacgcttaatttcgactgatgcatgtcctctaaaataggataggccgaagaaaaagatagcaaaaacacttgctgtgatgattgctaattgcaaattcatcctgaagctgtgtagacaaataaaaatcacggcaataaaagaaatcacagctgagagtacaccgtaaataactggaaatattgattctttttcttccttttgcataatcttttcctccctaattgagacttagtaactttacgaacttagcagaaatcagccaaatttgcaagattctacgttttcactgatttttttacataagttaagtatacttagcataattaaaattgcacggagaaaaaaggaaaatgaaacaagaaaaacattattatttcacaccaattcatttgcaaattaatgacttagacgtgcaactagttttgccacaagtcgagcaagcagcagaattatatcaagctgttgcctgtgaccgtgaaaatttaggtaagtggctgccgtgggcctacaaaatgaaaagtgcacacgatgaagctaattttattaaacaaattcaagccaaaatgaaacggcagtcaatactcgttttaacaattttagtcaataagcagccaagtggcatgatcgacctgcataatttgattccaaataaaaaagccgagatcggctattggctgtcgagtaaatatcaagggcatggtattgtcacgaagagcgtaacggcgttatgccagcatgcttttagtgagtttaacctacactatattgatctgctagttgctgtcggcaatgacaaaagtgcaaatgtggctaagcgttgtggttttaaattgatgggaattgaaccacagctaattaatgggcctgacggacaaatttttcgtttgattcgagggtaaatatattgtgttcgcttgttatcaaagctaatattagataaaatatttaaacaagtgtttgagcataacactttactataaaaatgaactcaaatataataaaagtgtaaggtgatatgcatcaatgagtagtcggctcatggtcaatctgattctaatgcaggacataagggcctgacgggtagcagggaccaaaattaaacctgatattacatatctaagacgcaatggcttagttggtggcagacaccaaaattaaaccgactttaggagttcacaatttgtggactccttttttacttggaggaaaagagatgaactataaattatttaaatcagttaatttaaaagaattggggcaattacgtcggtacatatccattatttataatagtgctgatttttatgataaacattttgtaaataaaaccatcatttacactactaaaaataataaaattgaactcactgcaagaagagataactttatgcatttatgtggaatttcatatatcgaagggccaagaaaattttttaatgatgctctagatcgaaaagtacagctaaaaaagttcttattaaaaaagatggctctacttttcagaaattacaagttttaaatcaacttaaagaaatgttaggtccacacttaagattaacaggacgtggagcctttacatacctaaaattcgatcattctttacgtacaaataaaacgatcttggctcttgcattattaaataatcaaaattatatggttccaatctctttgctaaatttgaaattcatccatccatttcctaaaggagataagattattaaaatagaatctaaagatctaaatactggtaagattattactcttagatgattcgcagctaaaaccacccagtcaaatctttaataatgaaaaagataaccggcaccaataatgatggcaagaaattcagagtcttaacatcacgaatttttaataaagacaaaccggagcaagcaatcaaaaagccaccaacaatagacaattcagtaactaatggacctgtaaaaaaatcagccgacaaaaattttgctaccaagtaaatgctaccttgccagcaaaataaaaccggaacgaccgctagcatcccccaaccaaagctagcgccaaagaccatcgaagttactaaatccagcatggcattggtaaatagcatagtattgtttcccttaactgccgccatcacgggacccacgattgacaaagcaccaatacagcaaagcaaaatctcagtagctagacctttagctaaattagatttgcctgctttatcaactaagtgattaaaacgaccagcgatattgagcgcggtaccgactactccacctaaagccaagctaacaatgaacaaaactggatagtgacttttaggcatgctgttagtcacattctcccaaccgatgcctaacgctgccagtcccattgcgatgaacaaaacgtcttcataacgcttattcaatcctttctttaccaagcagccaactgtagtaccaaccagcaaagcgcaagtatttacaattgttccgatcatttttctcacctcttagttttattttaccgcagaaaaaaagtatccatctcggatactttttcatatttaccatttaaaatgccaactactactcgatgacgctgaagaactagatgaagatgtgctttcacccgtacctgaaccataaccagaattcgaaccacctgccggcttatcttgattttgatcataaatccgataattggtgaaagcattgggatcatcccacttgatgtgattgttctgatcattcaattcattttgccgcgtttcttcattgttcaaagtttgtgtttgcaaattcaggttcttacgaattttatctgacgtcttttgtagttccttagtagacgccacctgaattgaagaaccatcaatccaagcatcatgcccttgaatgtagccactctttaagctattcatgcagccacgataattgagcgccaaactaagcatatcattgaatgtcagattagttttcacatatttattgaaaatatctaccagcttgcggtaattgccaagcgtattaaccgacattgccttatgtgcaattgcctcaatcacctgacgttgccgcatctgacgaccatagtcaccacgtgggtcttcttttctcattcgaacataagccaccgcgtgccgtccatttaaatgctgcttgcctttgtggaaatcacaccagtcatacgagaagtcaaatggaacttggacatcgacaccaccaactgcgttaaccaggctttttagcgccttcatattaacttctagataataatcaattggcacatttaacattgatgacacagtcttcatacttgattcatgtccaccgatttcataagcagaatttacccgaaacatgaagtatttattttctggatcgcccttaatatctgccaaagtatcacgtggaattgaagtcattgtcgcagaattcttttgtggattagctgttgctaaaatcatagtatcggaattaccacgatcatggcgaccttcaatcccctggtcaacccctagaactaggatagaaattggctgtttattggcaattttagctgaagtagcagtgttgccgccgtttttaccatcaatcacactatggacggtaaaatacatgtgagcagcccatgccatgccaaaacaagcagttaataatactgccacaccaatcaagcgggcaaaaaagttacctgatttgagcgctgatgcatctgcggctaaagcacgattccgatgaagattaagcgatgaacgatgagcgcgataaccttctcttcgttttggattttggtccattcttttgatcgtttcccttcgaatttaatacaagttagtttatttgtatcacttttaatctctcgataaaataaaaatgctaataattaataataacttatttttttgcgaaatataacgcaacaagctaagatgtatagaaaatgaaatattatggaggtaaaaatggcaattccaactagaaacgaagtccctgaagagcttaaatgggacttaacccgtatttttaaaaatgacgatgaatgggagcaagcttatgcagctgcacaagaaaaagtggctaaacttgctgaattaaaaggtacactagctaaatcaggcaagaacctgtacgagagcttaaccaaaatcttagctgttaaacgtgatgtggaaaatatctacgtttacgctaccatgtccagcgatgttgatacttctaattcgcactatctcggctacgtcagccgggtacaaagtttggctaaccagtttgaggctgcaacaagttttattaatcctgaaatcttgagtatccctagtgataagcttgagcaatttaagcaagctgaacctagattaaaggattacgcacactatcttgaaacaattactaacaagcgtcctcatacattacctgctgagcaagaaaaattgatcgccgatgctggggatgctttaagtgtttctgaaaatacctttaacgttttgaccaactccgacatggaatacggttacgttcaagacgatgacggcaatatggaacaattatcagatggcctttattctttgctgatccaatcccaaaatcgtgatgtcagaaaaggtgcttttgatacactttatgccacttatggacagttccaaaattccttggcttcaactttgtctggcgttgtaaaaaagcacaactataacgcacgtgtgcacaagtataattcagctcgtgaagctgctttagccgataatggcgtacccgtagcagtttatgacactttaatccaggaagttgattcacacctagacttacttcaccgttatgttgcgctacgtaaaaagatcttaggcctgaaggatctgcaaatgtgggacatgtatgtgccactaaccggaagaccttctctttcatacaatttcgaagaagcaaaagagacagcaaaaaaggctttggctccacttggtgaagactacttgaagcatgttgactatatttttaataatcgtgtcatcgacccaatagaatctaaaaacaaggtaactggtgcctactccggtggtgcttatgataccgatccttatgagttgctcaactgggaagataacatcgattcactttatactttagtccacgaaactggtcactccgttcactcctggtacactcgcaatactcaaccttacgtttacggcgactatccaatctttgtggctgaaattgcttcaactactaatgaaaatattttgaccgaatatttcttagaccacattaccgatcctaagacgcgggcctttatcttaaattactaccttgattcatttaaaggcactttattccgtcaaactcaatttgccgtgtttgaacaattcttgcacgaagccgatgctaagggagaaccactgaccgctgacactttagacgacgtttacggtcaaattaatcagcattattacggcgatagcgttgaaccaggcggcgatattgcccttgaatggtcacgaattccacacttctactacaatttctatgtgtaccaatatgcgactggctttgcggctgcaacggcattagcaaacaaggtggttcatggaacgcctgctgagagggatgcctaccttggtttccttaaagctggttcaagtgattacccaactgagatcatgaagcgtgctggcgtagacatgactaagcctgactacttagaagatgccttcaagacttttgaaaaacggttgaacgaatttgaaagcttgattgagaaataaataatcgcgctcatataaaaataatcgatatcatttcgtgagatttgatatcgattttttgttgatgatcttgatttattacttggcatatttatcgctcaatatgtataatacgtatataagtattatagtgccagaaaaggtgaaaaatatggctgaaactttatataaaaaggtcgttaaaaatggttcttccttagctatcaatatcccagctaaggaagtaaaagagcaaaatctcaaagtaggcgatattgttgaagtaaaaatcaaaaaatcagaccgtcctaattctgaaaatttaaaagaaatagatggcttaatttctgattactgggatatgttagagtacttaaaggataagtagtcaatgaagatcaattatctaacagaaaaggatattttagtaatcaatgcaagggttattcaaagagaaggtgcaacgggacaaaaacctcacgttagggatgcagaagcccttcattttttagttgttcaacctaagcaaactagttttggacaagaattatatccgtcttttgctgaaaaagctgggattttattaattaaattagttaaaaagcatgtttttgaagatgcaaataaacggactacagcaattgcattcttactatttttacgacgcaattcttatgaactaacctgtgattggcaagatttagcaaatcaaatcttaaagatcgctcaaatagatgacaatgaactaaattaccaagaaatctatcaatgggttaatcaagtaattcatgaaaactaaaaataatcgatatcattttcgccctaatattatattttatatgaaataataaccactttataaaaaaataagggctattaacccttattcataataaatccatcaactatttcctatgtcatactactactcgattgtcctgcataaccagctagtgtagcctgcaagtcatgaataactttaggagcattaaaatttttagcaaattcgtactgttgcaattgataatataatctagaaccgatatataaagcagaatcattattttccgcttgatcaattgttctatccaaaattcttaccaaatttggattatcaattacatctttactaaaacgaactttttctagttcattttttaactttaaagtctcatccttcttaatcattatttacaccaaaggatgcgcaaatggtccatccttctgccatccagtatacataatacgaccaacgctatcccacatttgtgctaaattatcatgacaataatatcggttgcaatatacaccattaccatagtaatggtactttccgcctccgcgcttgtgatgtgtaccgcctaaaacttgacttaattgattttcttttagttcttgaaactttaccattccagacacctccgataaatctttaagcctgcctcacttagtacttctatcaacttacatatataagtctaccaaaacagtagtgttttctaagaaaacgtcagaaactggcaacgttcatatcatattctgttaaaatacataatttgatcaagaatttagtacctgtcgatttaccaatcaaatactccagttacaataccgttagcacccactgctgcatatctttctagtttcagctgaagttcaactatagctttaggtagttcattttcactaaagttttctttcaatttcaaagacaaattagaagcaatcgattgaattgactcatgcttatcagctttcgcaatagcagcttgtaataactcaaccaattcggcatttttcttaacttgaggatctgaaatcactgtattcaatctactcttaaatgcagcttcttctttaagattctttttaaagaacatatttatctccttgtattaaccttgatttttcagaaaatcatacaactcagtagctgtttttcctccacctacccatgcgttagcaatttcaccgtttttaattcgcataacagtgggagtacctggcacttccaagttatcaaaagcataatctgcattatctttactttcatcaatatttaaatagtataattgaccaccaatcagattattaaattcatttaaagtggctgaatattgtcgacaataatagcacgttgggcaaccaatatacaaatatctatcaatattatcttttttatcgaaaaaagaatctacttcatctgaattaagagactgtaaaatattttgcgtaaggatgaatgattccttaaatttatttctttaaacattagaaaaaggagttcctttctcgtatgattggtttgaacaaaaaaacacatacagaaagaagaactccttcatgaatgattttaccaaagattttgctcaagctctattcaatccagacaaaataaatgatttattgcgcaaagagctacaacaggctgttaataacttgttagaagctgaattgactgcctttctgggctatgatccctatgccagaaatggctggaatactggcaactctagaaatggtgcttatttccgcaaagttgatacgcaatttggcccaattgaagtgcaagtgcctcgggatcgcaacggtcaatttcatcagcacacgctgcctggctacaagcagcactcggatatcttggaaagcatgattatcaagctttactccaagggcgtgaccaccagggaaatagccgatctaattgaaaagatgtatggcagccattacagtccagcccaggtatcaaatatttccaagcagatgattccaaaggttgaggcttaccacaaacgcaagctaagcgacaagtttttctgcgtctatttggatgcgacataccttcctttgcgccgagaaacatttgagcgtgaagcagtctatattgccattggcatcaagcctaatgggcacaaggaggtcattgactactgcattgcacctagcgagaacattgaagtctggacagatatgcttcaaaacatgaaatcccgaggcttaaagcaagttgagctttttctttctgatggtgttgttggcatgaaaacagccttggccaggacttatcctaaagctcattttcaacgctgcttggttcatgtcatgcgcaatatctgcgctaaagtacgcgtcgacgatcgtgaaaagatcatgaacgaattcaaacaggtgcatcaacagacaaacaaagaagaagccacagctgtcctgcatgacttctataccaaatggggcaaggtttacagccatgttatcagaagcttgaaagacatagaaccagatctgctggtcttttataactatcccaagcagatcagagcttcaatttattcgactaacatgattgaatcatttaacaatgtgatcaagcgcaaagctaagcctaaggcagagtttccaactgaacagtcgcttgatgcttttattggcattcaggcaatgagctacaatgaccgttatttcaatcgaattcataaaggctttggtcaggttcaggacaccttagaatcctactttgattaaataaataattaaaaaatcaatttacgagaaagaactatttacacaaaagatttgacagtttcttaattggagacgctacaacttgccaatttatagctaaaatacctaaaattaataaaataaaaatatttgtatatttttattgctttttcatagttttatattcctacaaaaatctcagcagcaaaacaatggaatcacaattggtgccacaagttttactgttctaccaacatccttaccaaatttatagcaattatagcctcttttaccacctacacattctagtaagttttcatcttttaaactttcaaattttttcataattattcctcacctcgcatatttacatagtccttccttaaatccacgccaatacttaccttccgacttccaaaacttgttccatcctttactacctcctacaacacttaccaattcgtttgaacttaacttttcaaaaccaacagtattttccatttttatacctccgataaatttttaagtctacctcgcttagtacttctaagcgcatcatcaacttacatgtataattttaaccaaattaattcaatatccatgttatcgttatatattgttaacatatacatcacgcgtggtgctagttaaatcgttctagacaataagccaaattataagctaaaattgcaatttccaaccggctttgaaagcctatcagactacgtgctcgattgttctcggcattgtaataggtcagaagcgaaaagtcgctttcaattgttctgcgaatagccatcaattgatgatcattgtgctttttagctcctgtcatatttttacgatatggtgtccaaagttcgtaacccatttgttttagctgttgatgcagttctttgcctaaatagccttcgtcgccaagaagatagtaattagatggatgggtattttctatcagttcaactgtctccctggcatcatgaactgatgcctttgttacgacataatcaagaatgtaaccgtcatcgctaacaatggcatgaactttgaaaccatagaagtaaattttcttggtggccttataaccaatgttggcataaccgcgaaaaattttagcacgatagtttcgaattggttggcaaacaggtaccggaaagctgtcaatgatcaagaactgtccattcaggtcaacctttttattcatttcttgccgtatctgataaatcaattgcaatagctgacgtgaacgccgattaaaacgtgagtgtgataaacaattgaaacattcacagaatcttctttgtgattcaattcctgtcttagcttgccagataagtaaagccaaaatcagactgtccgtagttttaatttgatcaatatttcgccgatgagtaaactcagccggtgcatacaaacgataccagtgccgacaaattatcactaaatctttaaaactaacttgtaaatggtggctaaaacgcttaagcttaaggcagttcaatcagatcagactcttttctattattactatttacaagtcgagtctaacaagattggacttttttattaactaaaacgatttaactagcaccacgcgtatacatcatatttcactatgttacacaacttgataaagcatcattttactttgtatttccaaaacagtttaacaaaaaatcatcagtaatcgcgcttatacaaaaataatcgatatcattttgccaactatgatatcgattatttacatgctgtttgatattgaatttttttattttctagatcgaaccagttaagcccgcaaatttccacttatctggattctcatttaacatgatctttaacctaattagtgcctgtggtaatttaaaaccatgtactagtgaataattattcaaatcacggttcagttcaaatactaccttatcaaaattaacaccctgagttaacttgcttaaaccttgattgattaacttcgttgcatctcgatcatttacagtctcttgtcttaattcctcaagaatttttttaagattttgtccattatcttgcaattttaagtcgcttccttttaattaacctctactgccccatggtccatattgtaaccatccattggctacggtttgacccgctttaccccaaattgcaccgtaatctgggatagttttatgtgtcttagtattatacaacatatatggagttaatcgaataattttaccaccaacaactctatttagctcaatattatttactaccttaaaattcttcatttccaatacctccgataaatctttaagcctgcctcgcttagtacttctaagcgcctcatcaacttacatatataactttaccagaatagcaggattttctatgacattgtcataaactgacaatattcacatcatattctgctaaagtacataatatgaacaaaactcatttagaatttagcaccctggatctaatataattaaagtagctagctcttcccgtaataattgacacttttccctgcatcccataccgcaaaaaatttctctctgacttggtagtttttaccatagtttccacttcaaacatacttatttttttctgttgaacagggtaagtacctatattagtaatttttccattaagtatttcagatgttccctgcttattttcaatattaaacttcatacgttgacccttatctagcacagccacttcagagctaggaacgtacgttattactcttaatttctttctatcccttatatcaggcatcgcaacactattcttattatctagatgaataataacattattttctaacataccttttttgccatcagctagagtgacactaattcctttagataatttttgcccttctttatattctttattctctaacgttactacccgatctggagtaataactcccatactattcatcacattttcatgcacagcaaaaaatgatccaataaatagtaaaatcacaaaaataaaagctggtaaaattatcattgtcgaaaagttacgaaaattatatgaatagaatttactactttctaaatcttgatcattcatttaatatcacctagcttttcaccaaatcataataatacccatgtttagccattaattcactgtgattaccttgttctacaatttgaccctgattcaataccacaatattgtcagttctttcagcaatagctaaacgatgcgcaataaatataacagttttattctttaacctaattaaattatcaaccacttttttctcagtaattgtatcaagcccacttgttgcttcatcaaaaatcaataccttagcaggtgaaagtaaggccctagcaattgttaatctttgcttctgaccacctgacaaaatcttagcattttcatctaattgtgtattaaatcctaatggcaatttttcaatgtcattctttatctccgcgatttggcaagcttcttctatctctttttcagttatattcttacgacttcccaacaaaagattctctttaatggtacctgcaaaaatatatggagtttgtggcacataattcacatatgagcataaaacatgcttatttatacttctagtcgaatgaccattaaaagttacttttccttttgtgggactgaaaaaatcaaccaacaatttaaccatagttgacttacctgatccactcattcccacaatagttaatttctcattatctttgatcgtcaaattaatatcttttaagacatcttcaccatatccataacgataatcgacatgtgagaaattaatgtctccatttaaatcatgactatcattaactgaagttttgcccttaaattcactttgaactaaataaacttcatttaaacgattctgagctacatttgcagcttgaagtgtaggttgcaagttaataatattttgtaatggatcaataaaatatgataataatgcattaaatgccatcaattcaccaatagacatctgattatgcattacaacacttgcccccacccaaagaataatgacattcagtgataatctaataaaagttttcaaagcagtttgaaaagcttctgttttgctatacttaaaagctttttttaaataatcaacaaactgactatcaatttttcgataacgtacttgttcactgtttaatgctttaatcgtctcaattccttgaatatcttcaataattgatgaactaactaccgcattactttccatctggtcattatttaatctttcaaacctttttgaaaagccgagaataacaatagcatagagtggtaatgaagctagcgtaatcaaaaacaatgtcatgttttgaaccgccaaaattatacccattaaaattacaattgaaagatcaaggaataatgaaatcaccgtacttgccaatgcatctataattctacttgcatcagaaaaacgagaagtaatctcaccagtttttctggtagtaaaaaattccatcggtaattcaaaaatatgcttaatgtattgtaaattaagatcgattgataaccgctgccccaaaacattcaataaaaattgctgaccatatgaaaaaattgagttaaagacatatgcaatcaataacccaatagctaaaacagataacgtggtaaatgtaccgttaggaatatatgtatcaatcaacccttgtacaaaatatgagctacagatactaatcagtgtcatcagcaaagcagctaaaataatgtttctaactaactttttctgtttaaacatataagggaataatgataatagattattctttttctcctttacaggcttaaaatctgccttaggcaccataaacaatgtaatacctgtccactctttttcaaacgcctttttggacatttttttaattccactagtaggatcaggatcggctacgattatttttcttttagtatttttaagaactacataataatgtaacaatcctccatcttttatcacatgaacaataaaaggatattgaatatctttcatattgaataaggacatatctgcttttaccgcttgaacatccatattgaatttttccgcagttttaactaatcctaaagcagtagttccttcagtattggttttagcaatatgacgtaaatgtgctattgatacttgagaatgataattctttaagatcattgctaaacaagctgcaccacagtctgtttcatcgatttgtggaacataaattgatttatacgttaacatgcccatcatttatctctttctgcttagctaatttctctgttttataattatatctagcaagaaaatctttcatcattttcacactactacgtgaaaaatcttcaacatccccattaacaaatgagacacgatgctgtttcaaatcaatcgactcaatgttcttcggattcaccaaacaagactggttaatcttctctaacataggattttctttagcatattgattaatactacctaaaagttgcatttcacctgtcgtcaagatcattaataacttgtgcggggttatagttgttgaaatataaataatatcatcaatattgacattcctagtttgacgtccaattttatacgaaaaagtcattttcttcatataattgaatttgtgtaagttgtagatagctacttctacagtctttaccatcatctgtctaaatttatccaaatcagatgtttttacaatgtagtcaattggacctaatcgtcttctgaatgtaattaatgataagtctgcatgactagttacaaagataatttgagctcgttcatctcgctttttaattaaggcagccagatcaaagccagtatcttcttccgtatcaccgcctaattcaacatcaagaaagtagataccaccatctaatttatgtttcttcagataatcaattgcacccatgtaatcagttgcagatgcaattgaaaattcaatttcttcatcatctgacaaaatcatttccgcagcaccaagaattttcttagtttgctcaatttgattttgatcatcatcacaaataaatactggatattgcattttttatttttcagtcccactttcactatcaggcaaaattgttaaatcaaaagtaaaccacccatcatcaacatagtaattaacaatcattgaatcttcatatttatgagtaatttcttttacattcgctagtcctaaacccatatgatgtttcttggttgtataattcttttgacttattttatctgtcgctactccactttttctaacgcgatttcgaatttcaaactcgaaatcgccgttttcttgataatacattgcatctattcgcgcactattagagttacctgtttctttgatcaaggcctgactttcttctgcagcattatcaaacgtgataccaattattctgaccagatctaaaatattaacactatcaggaattcgagaaatgtcgtgttcacaatcgaaactataatctagacctaaactgtagagttttgataacttagcaattgcaatactttttagattgttttcatggatatgatttacgcccttatacttacgcaatgcttttttattaaactgtgtttcagtgtagtgatcgagaattttaacaacctctttagagttaccttcttgagcgcttacttttaaaccatttaaaacattttgataatcatgcttaaagcgacgcaaatcatcttcgtttttgtcaagataacttgaatattcccgtagttgtttcatttcagaactcaattgctgctgcttaagaatcaattccttgttttctgcttcttttgctttcctgtcagcgtttgccaattccagctgcaattgttgttccttttgctctcgtttggttagaagatctttttgaattttaacagttgtcaaataagcaaatacagaaaaaattatttgaagtatcaataaacttaaagatacttcaaataataccgtcatatgtgtactctgtaatgctaaaaaatacacaatggaacttgataaataaacatataatattaatccaataaatattgaattatttcgatcatttaaaagctttcgaattttcgaaactgtcaaatcttttgtgtaaatagttctttctcgtaaattgattttttaattatttatttaatcaaagtaggattctaaggtgtcctgaacctgaccaaagcctttatgaattcgattgaaataacggtcattgtagctcattgcctgaatgccaataaaagcatcaagcgactgttcagttggaaattctgccttaggcttagctttgcgcttgatcacattgttaaatgattcaatcatgttagtcgaataaattgaagctctgatctgcttgggatagttataaaagaccagcagatctggttctatgtctttcaagcttctgataacatggctgtaaaccttgccccatttggtatagaagtcatgcaggacagctgtggcttcttctttgtttgtctgttgatgcacctgtttgaattcgttcatgatcttttcacgatcgtcgacgcgtactttagcgcagatattgcgcatgacatgaaccaaacagcgttgaaaatgagctttaggataagtcctggccaaggctgttttcatgccaacaacaccatcagaaagaaaaagctcaacttgctttaagcctcgggatttcatgttttgaagcatctctgtccagacttcaatgttctcgctaggtgcaatgcagtagtcaatgacctccttgtgcccattaggcttgatgccaatggcaatatagactgcttcacgctcaaatgtttctcggcgcaaaggaaggtatgtcgcatccaaatagacgcagaaaaacttgtcgcttagcttgcgtttgtggtaagcctcaacctttggaatcatctgctgggaaatatttgatacctgagctggactgtaatggctgccatacatcttttcaattagatcggctatttccctggtggtcacgcccttggagtaaagcttgataatcatgctttccaagatatccgagtgctgcttgtagtcaggcagcgtgtgctgatgaaattgaccgttgcgatcccgaggcacttgcacttcaattgggccaaattgcgtatcaactttgcggaaataagcaccatttctagagttgccagtattccagccatttctggcatagggatcatagcccagaaaggcggtcaattcagcttctaacaagttattaacagcctgttgtagctctttgcgcaataaatcatttattttgtctggattgaatagagcttgagcaaaatctttggtaaaatcattcatgaaggagttcttctttctgtatgtgtttttttgttcaaaccaatcatacgagaaaggaactcctttttctaatgtttaaagaaataaatttaaggaatcattcatccttacacaaactattttacagtctcgaatttttaaataatacttttggattatacttatagttgcgatatctagaattaaaaaagtccaaataacactaccaacattaataccaaaaaataatgatattatttcaacgccaatagtcgtaagcaaatctaccatttcaaaaaataatattgcaccaatatttgactttatccttttatctctttttataaaatatgagaataaaagaatacatatgacttgaaaaatatctactacgaagtcatttattttagcggtgaagctagttgtaaaacaagctaaaacaaagaaaatcgtaaacactaaatcttttttttggaatttccaattagataatttataaaaaatacgcgtggtgctagttaaatcgttttagttaataaaaaagtccaatcggactagactcaagttgtagtatcaaaaagaaaagagtctgatctgattgaactgccttaagcttaagcgttttagccaccatttacaagttagttttaaagatttagtgataatttgtcggcactggtatcgtttgtatgcaccggctgagtttactcatcggcgaaatattgatcaaattaaaactacggacagtctgattttggctttacttatctggcaagctaagacaggaattgaatcacaaagaagattctgtgaatgtttcaattgtttatcacactcacgttttaatcgacgttcacgtcagctattgcaattgatttatcagatacggcaagaaatgaataaaaaggttgacctgaatggacagttcttgatcattgacagctttccggtacctgtttgccaaccaattcgcaactatcgtgctaaaatttttcgcggttatgccaacattggttataaggccaccaagaaaatttacttctatggtttcaaagttcatgtcattgttagcgatgacggttacattcttgattatgtcgtaacaaaagcatcagttcatgatgccagggagacagttgaactgctggaaaatacccatccatctaattactatcttcttggcgacgaaggctatttaggcaaagaactgcatcaacagctaaaacaaatgggttatgaactttggacaccatatcgtaaaaatatgacaggagctaaaaagcacaatgatcatcaattgatggctattcgcagaacaattgaaagcgacttttcgcttctgacctattacaatgccgagaacaatcgagcacgtagtctgataggctttcaaagccggttggaaattgcaattttagcttataatttggcttattgtctagaacgatttaactagcaccacgcgtataaaaaataaataaatctactattggtgaaattaatccctgtatcgctatcattactttaatccaagaaactttttccaattaaagtgaaacaatgggcgttttgacttattaacaatattattcattgcaaacaaattttgattaaaaaccatattagtaatagcaaatccacctttaacctcaactagctcttcttcattcaactttttcattatttatgcttcctttcaatttaatgcactaacaatttttacactgttaatgttactacgagcgcaactttatgattaaaatcgtcatattctgtaccatttagatcatattctgcattttcaattaaaatgctcctccaccagaaccatttccccaactattcgacttcttcttgaaaaaatagcgtttagattttgatcgtccacccacaatttagacatgaactagatagcttccgcatattttctcttcccttcatttaccattttgttacaaataaaagcataactctatctagcttctcaaaattaagctcatcagattttgcattatcctaatcatattttgctaaaaataatcaatcctctttctcctctggccaaaaaagatcatctaatgtcttatccagcgcctggcaaatcctgatacacaagttaaccgacgggttataatttcccttctcaatcgcagaaatcgtctgtcttgaaacatcaatctgctgcgccaaatcttcttgcgttaaatctttaccgactcgcgcagccttcatttttaaatttttcaatccttatcactttccttatcacgatggagttgaaacaggcttactgctccaataatcaaccaataaatccccataatgttcagcgcactgttaaagtcatcaatatatcctagaatcaagcaaataccaagtaaaatatatagccaactatttgccttaacatgctcttcattaaatgcaaaatatgctccatggactatatcgtaaactgacatcaccgttaatgacaacataataattgcaaagttaacagcaataccatgctttgtataaaaatccgtctgcatgaataaagcagaaattacttctccaacgattaacacaagaaagctatacctgtcaccacgaccacgaatcaattcctgtcgttcatcatactttgccgcacgacgatttcccacgaatacaacgactaagatgaaagtcataactgcaaacaagcttgcaaaagccattaattttaatatttcaaattttgacattttacacatccctttcttttaatagtttgatattaagcccatattttcaaaatgtaaagtatgttttacatttttactaataaatttgtatttataaaaactagcattaacataatcggtatcatttcactagatttgataccgattatttgttaatgatacctatttttcaaaaatttccttgacttcttcttttaatcgtcgtattataatgacaattaaattaataaaagcttagaagagatgagtaattacttaagacttctgcagagagtcggagttggtgcaagccgatgtggttgagagtaatgaatatggtcttggagctagtttaaagagcaagctgttaagtaagcaatttacgagtgacgatcgttaccccgtccgagtattcccaattttgggagcacttagtaaggagttagttgtgaagctaacttgaatttgggtggtaacacgcttaggcgtccctagcatagaaattctatgctaagggcgctttttattttgcttatttaatttttcagaaaggagccagacaatggataaacctatcaaaactacaagttcacaaatcatcatcagtaaaaaggcattcaaccgaatgtgcactattgtctggttgatcttgatcatcatcggacttttcatcgttaaataaaacatcgaagcaaaactaaggagaaaaattatgacagaattacattacgatatcgttggtagctttttaagacctgcagaattaaaaaaggctcgcgcagaatttgaagaaggaaagattaagcaagaagaattaactcatgttgaaaatacagagatcagagaattagttcaaaaagagattgatcatggccttaaaatcgtaactgatggtgaattcagaagaagttattggcatcttgataccttctggggctttgggggtattaaacacactaagcaggcccacggctatttcttccatgatgaagaaactcgtaacgactctgcccaagttgagggaaaaattaaatttactggtaaacatccagatctttcatcatttgaatacttaaaaaaggttgtcgatgaaactggcgctaacgtaattccacggcaaagtattccagctcccgcacaattttacgcagaacttgttcgtggagaagaaaatattgccgcacttaaaaagatttatagttcagaagaagatttactcaccgatatttctaaagcataccgagacttaattttagccttatacgatgcaggatgtcgcgacattaaactcgatgactgtacttggggtatgattgtagataagcgctattggaaaagtcatttacaagatgacttttcactagacgaccttaaaagaaaatacttgaagcttaacaatgatgcaatcaaagatttgccaacagatttgcgaatatcaactcatatttgtcgcggtaactatcactcaacttgggcagcccaaggaggttatggtccagtagcggactatgtttttgctaaggaaaatgttgacgccttttatcttgaatttgacaatgatagatctggcagttttgacccaattgcacaaattcctaacgacaaacttgttgtcttaggtttagtaactagtaaaaaagcagaattagaagatccacaaaaattaatcgctagaattaaagaagctgctgaattccacccactaaatagtctcgctttaagcacacagtgtggcttcgcctcaactgaagaaggcaacacgttaaccgaagatgaccagtggcaaaagatcaagttggttgtcgacactgccaagcaagtttggagctaaatggcaattaactagttaaaataaagataaatagatttagacaaaggagaaaaaaatcatgggaaaagttgaaagttttgaattagatcatactaaagttaaggcaccttacgttcgtttaatcactgttgaaaaaggccaaaaaggtgaccagattagcaacttcgatttgcgtttagttcaacctaataagaacgccattcctactggctgcttgcacacgattgaacaccttttagccggtcttttacgtgaccgcatcgacggctacattgactgttcaccatttggctgtcggactggcttccatcttttagtttggggcaccccatcaactactgaagttgccaaggcacttaaggagtcattagaagaaatccgtgacaacattaaatgggaagacgtaccagggacaacgattgaatcttgtggtaattatcgcgaccactcattattctcagctaagcaatggtcaagagatattttggctgaaggcatttctgatgacccatttgaaagacatgtggttgaataaaatttaaaggtttaactgaaaaatagtaaataattaaaaaagctagcaattcattttagtgaactactagctcttattttttcacttatatcatcccggcaactaagccaactatatacaagaagacacagcagactaccaaatacaaaccgccccacttgaccgtttcttttaggatctcgccttcgtctccctcacgattaattgagccggttgctactgcaatattctgcggtgaaagcatccctgccgtggcccctgtcatgttcgaggctacaacccagtacttacttacgcctaagtccgttgctgcagtatactgcaaattaccaaataaaacattagctgatgtagcagatcctgttaaaaatgttcctagtgcaccaattaacggcgcaaacaatggataaactggtcctaaaaggccaaccaaggccactgctaatgcattcgtcataccagcataaaccattaccttagccaagcctacaatcgcacaaactgtaattgtagttttccatacgctttttatcgattgtcctaatatttgcatcatttttttcaagctgacaccctgaatcgccccaccaattaatgtagctacaaaaattaatgttccaggagaagataaccaactaattgacaatgtatttgggttctttcctgtataaacaacaagattagtggttactttattaagtacatcattgacagctggaactaatgaagaagcaaagatcacgaagataaagaccaaaataaatggtgaacatgccttgagcatttccttagcatttggacgtaaaacatctggctcttcttcatcatcatgccatctagttaataagactgtaatcgcaattgaacacaatgagccaacaattgcaggcaattctgcccctacaaattttgcagctattacctggggaatagccattcccagtcctgacatcaatgtaataaagcctacacctttaattgccttaatgctgccttcagtcaagataactaaaataaatggtaccagtattaccaaaatagataattgcaatgttacgatgaaggatagtttttcttgatgtagacccgtcacttcagctaaagttaaaactggtaatccaattgcaccaaaagccgtcgcagttgtattagcaatcaaactaatgactgacgcgcgaatcggatccaagccaaaggcaatcaatattcctgccgcaattgctaccgcagtcccaaagccagcgattgattctaaaaagccaccaaatccccaagcaataatcaaaacaataatccgcttatcggttgaaatcgtcgccagcatattttgaataatttccataccgccagattctgtagtaacgttatatgcaaataaagccatgacaataacaaacataatcggccaaatgcccatgataatgccttctagcgccccacttgccgtatctagcaccggtactttaaaactaaagactgctaacaccatcgtcaaaattaagccaatgacacaagcgcgtgcagctggcattcgcataactcccagcgaaataatcaaccaaacgatcggcaacaatgcgatcgcaaatctaatccacatcaaaatcctccatcatcaaaagtgttgtactatattatttaatcatgatttgggtaaaaagttaaaataagacacaaaattttagtttaaattacaattttcacaaatttcacttgcaagtttaaccaacaaactatataacaattaatggaaagtaaaatttctcacatcatgtttgaactactccgtggaatagagtagttctttttttgcgtaaaaaaatagccagaccgaattcagcctgacttctgttttttttagcgatgtttaattacgtgaataccataagcgattaagtaaattaccacttcgatcgttgcaataaagaaagttaccggccagttggtgataaagccgagatacagtccagcccacacgccaactaaagcgaaaaacacggaccaactgatcattgctggtattgttttaccaatatagcgcgccgttgaagatggcaatgttaatagaatgaagactagcaatgaaccaacaatctgggcaccgatagcaactgacatagccaaggctaccaagaaagcaataccaacccagccagtatgtacaccatgtgcaacggcaccgatatggtcaaatgagtcaaaattcaagcttcgagctaccaaaataattaatagtaaaactagaattgacaaaaccactagctgaatcacgccttgtttatcaacaccgatgatactaccaaacagaatattagtagcgtaacggctatttgatccagaaatggctaagaacagcacacctagcccaataaacagagctgagatcgcactaactgacgattctttttgatcgctgtgcaaggacaattctcctactccaattgaaccgagcaaggtaaatagtagcatcccccataacggtgcaatgccgataaagacggcaaaagctgctccagcaaagccgatttctgacagtgtgtgagctaaaaaagcataactccgtgctactacatatacaccgaccacgccacaggtaatcgcaatgaatgtactagctaagaaggcataacgcataaattcgtattgaaacattattcgaaatcctccttaaatttatccatctttccttgcctgatcgttcccttatttaaatatagataatcagtcatatactttttagctaaaggaatatcatgagtgacaaacaaaacggtaattttgtgttcacgattcaggtgcttgattaatcccatcaattcttccttagcagccggatctaggctagctgttgcttcatctaagatgatcatattgggatgatcaagtagagcctgcgctaaatatgcacgttgtttttgtccacctgatgcctcacccattcgggtattctgaatcttttctaaatgagtttcttctaactgatgatcaatctgttccttaacctttttggtcttaaacaatggggcgttaagtccaataaatgcacgaatcgacaatggatactccgcatcaatatttctaaactggggtacataacctaacttaacgtctgaatcaaacttaaagttgcccgcagtcggctttaacatccccattaaaatcttaattaaggtggtcttccctgttccattaggtccaagtagtgcagtcattgacccgtcttcaagctgaaaactcaaatcttgaaaaacatctttagtatcaaatctcatcgagagatcatttacttctaaaatcactcttctaccccctccctaagttgctattatttttctattttagccaaattttgataattttctttcatccaagccaagtaagtagtgtggttaggaatagtctcccgcacatttaacactggaatattattttccttagctaattttacaaataacttcacagttgaactgcttgcctgtgtattgttaacaaagaatgcaatcttttttgctttaatttcattattcatttgattaatcatcttaggactcggatcagtaccattctcaattgcttcttcaaagcccttatccccaatcttgtatcctgcttctcttaaagcataatcaaagacaggttcactaacaaagactggcttactatttttcttattagtcttcaccaattgcttaacttgattaatcttagctaaatacttgtcaccattagctttaaaataagctgcatgctttttatcaagcttagataaacgcttaactaggtaattaacatacttggttggcatacttagattgtaccaaatatgcggattatcccccttctttaatcccatcaagtcttcaccaactaagacaggctttttgctaacagaactagctagcttattcatccaagaatcatagcctaagccattagcaacaataatatttgccttggtcaattctttagcatctgccgtagttggttcaaaatcatgaggatcggtactgctattgctaatgattgccttagccgtaccatattttcctacaacatttttagcaatatctgcataaacattggtggtggtaataatcgagacttcacccgaattgctcgtcgaatttgatctattcgagcaagctgaaactaacagcgcaataacgccaattagtcccaaaaaagagattaacttcgtaattttagatttcgcattttgcataaaatatcctccttgtgcaaaataaaaaagcatttaagttagaaaattcagcataaattctaactaaaagttagaataatctagttaattacatatgtcaacatatttttgcatagacaaatagcaccagtctcccataagcctgatgctatcaataatttaagtcataaaattttgctgaattttattaaatgctttgttctaaaattacattattatataaacatatttttatataattgtcaaactaaactaaaattcttccttcacgtgctgacgcaaaacatctaagattttaatcacatgcttatcttctaagctataatagcgctcctgcctaacccgctcgctcttaactagcttagcctcttccaaaatacgcaagtgacgcgaaatagctggctgactaacatcaaactgcttaactaaattattaacactacttttttgattatcatttaaataatataggatttgaattcgaatcggatgattcaacgctctagtaatccgaataatttgctcgtccaatttcttcacccattcatactttttaatttattatagcttaaatttaggtacaaaaaacgctacccttcgggtagcgcaaaacataacagagtatcttgatttaagtagagatcatcaagatatttatattataatacgtttttgccaaaatgtattgttttttgattaataaccaggattatttaataatactaatattcgatattacttatagtattattcgtttgggtcttctttgacattcttcttccagaaactcatgattaaaccagcaacgattgaaccaataatagtagctaggaagtagaataagatgtggcttggaccaccgatgttaccagcaagtggtgatacccaaagaccaccgtgaggagctgggacaccaacgtgccataaaccaactaaagcaccaccaacagctgaaccaatgatacatgatggaattacacgacctgggtcagcagcagcaaatggaatagcaccttcagtaatgaatgagaagcctaatacccagttagaaacaccggcacgacgttcttctacagtgtacttgttcttgaagaatgtagtaccaattgcagtagcaaatggtggaaccataccacccaccattacagcagccatcaagatagcagcagtagctgagtgagggtcgttagcaaatgcacctgaagcgaagacataagcagccttgttgaaaggaccacccatatcgattgacatcattccggcaaggatagtggtcaaaagtaccaagttaccagtacccattccgttcaagaaatgagtaatagcaaagttaatgccactaaagattgggttaatgatgtagaacataattgctgcaataaagagcaatcctaaaattggatagaacagcattggcttcataccttcaacagaacgaggtaatttagcaaatactttcttcaaaccaaccatcaagtaaccagcaataaaaccagcagcaataccgcctaagaagccggctggtgaagttgcgtgagcttgaacgttaacttggaattgaccgttaacaatagaggccatgtaaccaccaacaaaacctggcattaaggctggcaaatcaccgattgattcagcgatataggctgccaaaactgggaccatgaaggcaaatgccaagttaccagcattgtttaaaaagatgaaagcaggagtcttagcgccacccatgtagttttctacgatgaatgagatggccattaagataccaccaccaataacgaatggaagcatgtgactaataccattcatcaagttcttgtagatacctgcccacaaacctggcttctcagttgatgaagattcagttgacttgtcttgagcacttgcatggtaaacatcagccttaccaccaataatgtcatcaattaattcgcctggtttgttaattccatcaacaacaggacggttaactaagtgcttgccgtcaaaacgtggcatatcaactttcttatcagaagcgataataacacccttggcacgtttaatttcgtcaggagtaagttgatccttaacaccttcagaaccgttagtttcaattctaacttcaataccgcgcttcttaccttccttaatcaaggcttcttgagccatgtaagtgtgggcaataccgttaatacatgcagtaacaccgacgattaatggcttgttttcatcatcgttgttaccctgtgccttagcagcttccttagccttcttagcttcagctgccttcttgtcttcttcgtcttttttagcttcagccttttcaaaaagatcgataacttcttcaggggtcttagcattctttaaagcttcaactaagtcaggatcaattaataaacctgaaagttttgccaaagcttgaaggtgagtattgtcggcaccatctggtgcagtaatcatgaagaataagtgaactggttgaccatcaagtgaattatagtcaattccttccttactcttagcaaacaatacacgtgccttgttgatgtacttgttacgtgcgtgaggcatcgcaattccgccaccgataccagtagttgattcgttttcacgtgcccagattgacttaataaaagcatcttcgtcgttaacgatatcagttgctacttcaaggtcagccatttctttaatggcatcttctttgttcttagccttaagctccataatcatggagtcagggcttaaaatatccttgattctcatatttttcccctcgttttttattaagaaatttgctcaactttgatttgtggaagaacagcatcaatttggctcttaactgcaatgtccttagtaaaggcagtagcagcaccacaagccattccaattctgaagccttccttaggatcttgggtcttgtagtaagtaccaacgaagccggcaatcattgaatcacctgcaccaactgagttaacagcagtaccaacagcacccttagcatggtaaacatgatccttggtaagaaggaaaccaccttcaccagccatagaaaccatcacattttgagcacccttatctaaaagcttttgtgcgtattcaagcatcacatcacttgaatcaaaagttacgccaaacaagtctgctaattcatggtggttaggcttaattactagtggcttatatgccaaagtatcaagtaaagcttgtccagtagtatcaacaacaaattctgcacctgcttctttaatagtaggaagcaatgattgatagaaatcagttggaaggcttggagtaagagaaccgctcattactacaatgtcgcccttctttaaatcgtttaaacgatccttaaaagcagtgatttcttggtcggtaatgttaggaccagccgcgttaatttcagtttccttttcagcgtggatcttaacattcacacgagtgttatctgaaatagtaacgaaatcactttcaattctcttttgattcaattgacgaaccaattccttaccagtgaagccacctacgaagccccatgccgtattatcaacatttaattggttaaggatttgagaaacgttaattcccttaccccctgctaaaaatgaatcattgttagttctgttaacttctccgcggttaactttttctaattgaagaacatagtcaagcgctggattaacagttactgtataaatcatcctattttgcctcctctaattcaataccgactggtaatgaccgtttttgacctggttttagttgatcagttaccacaatcacgtcacttgtattggcaaacacagcaaagttacgctcaccgattttactattatcagttaatacataagcgtgtcttgcctgtttgatttcggctgccttaaccgcagcttcctctggatcaggtgtagttagattgccatttttttcaattccattagcaccaacgaagctagctgaaaaattcattgccttaatctgacttaaggcggtctgacctataacagcatgcgtatcgtccttaacttcaccgccaattagaattgtgttaattccgtgatttaaactgcataaagcagtctctacaccattagtaataatcttgacgttagcaacctctgctaaaaatggtaccatctcataagttgttgttcctgcatcaatgaagacattgtcacctggacgaacaaaattctgcacggcatatctagcaatagtgatttttgcgtcatgattcaaactgaagcgaacgttttgtgatacatcacgagaaaaatgtttaactgattgggcaccgccatgaacacgcttaaggatcccatttttttccatctgaattagatctcgacggatagttgattcagatgttgcggttaagtcacataattcacttacgcgacataactcgtgttgattaacatagtcttcgattaagctttggcgctcctgagtcagcatcatttctcacctcgataaatattgtattcgctttctcctccaaaatcaatcatttttcttcaaaaaatgtcatttttatttattatcgttcaataacattcatttatatgcaaaaaagatgccgttttttgattgaaacgacatcttttcttcgtcatttggaattattcttagtcgttttaccctatttgactaagaatccgtaaagatgactaagaaagagaaccaaagatctattaaccttgcaaaagcaaaacacgctgaatcattattgattcagcgcgttttactattaaatatattttgtctagcctctcaagctacgcttaaagttttgccatgggccgacatcatctgtttgcaaaatcaagtttggatagatttttctaatccagataaatgacgctactgtagcggctaaagcaattaaagcagagatagctgcctctaaattagttgcgttacccataattactctagctggcattacaaatgatgatagaaacgggatgtacgataatactttagcaaaaatcgtatccccacctgattgcatattgactgtgaacaagaacccgatcaacatcaatgtagatagtggtcccaccgctttgttggcattctcgcttttagcaaccaaagcgccacagaaagctgcaaagataataaacaataccaagccgattatcgtaaacaccaatccccaagaagccagattgccaattgcttgatcaatcatcggcttatactgtctaaataaatcgctaaagccatcgatgtatggggccgcgcaataaactgccacaaaaccaacaacataaattaacacttgggtgataatttcaccaaaaatacctaaaatcttcccagtgaaataatcgccacctggcatactcgaaaagattacttccattatcttggtacccttctccgtagcgatatcttgtgctgttacttgcgtataagtgatcacaagcatgtacaagataatcagcaaaacccagaaggaaatttgcttaacaggatcattatcaaagctcttcttatcaacatgcttaacttgttgcttaaattgcgctcgcgtagctaaagactgagtctgttttgtcgttagcttggccttacttaaattcaattgttgctgggcggtgtttaggctagttagcagctctgattttagatcactgtccattttttcatcactatagtaagttgcagctaattgattattcttttgttcaattaaaacatagccatcgatatcttcatctttatacgcctttttagccttagcttcagtgctatagttgtcaaagtcttctgactttttaattgcttgctttaaggcagaattagaagtaactaccccgacatagttgtcatcactgccgccagctgataccattccgataacaaatgaaaagaagacgagcagaaacggtgctaaaatcatcagcaaatatgaccaagttttcacttctctacggtaggtttcttttgcgacaagccagatcttattcatgacgcgcacctgctttcattttgaaaatctcgtctaaagttggaggttcctggtcaaaagtctggatatattgaccggccgaaagttggttaaaaatatccttaccatatttttcgtctgcaagaataagcagcttcattccattgttttgcaaaattatatcttttacacctggtaaggctgataattcagtagcacttttgtctgtcctgacaaaaattcgagttaggccaaagctgttcttaatttcatttactgggccattcaagacgatatgcccatcattgatcattacgacgtcatcgcacaattcttccacgttacgcatatcatgatcagaaaaaatgatcgtagcgccttttcttttttcttccaaaatcagctgcttcattagatcaacattaacaggatctagtccactgaatggttcatctaaaataatcaatttaggttgatgaattaaagttgcaatcatctgtactttttgttggttacctttagacaaagacttaatcttatccatggggatccctttaacagccaaacgtgataaccaatcaggcaattcttcttttacctttttagccggcatccctttaaggctagccaaaaacactacctgatctgaaatagttaacttaggcatcaaacttcgctcttcaggcagatagccaatattgtcataatctttagcgttgaaagaatgtccatcaatactaatctggccgtcataatcaacgaatttcaaaatactatgaaagatcgtcgacttacccgacccatttttaccaaccagtccaagaatacgcccatctgacacactgaagctaacatcaaacaaaacctgtgttgacccgaagcttttatttaggtgttctatttttaacataatttttcctcaactttttatctaatggttattagacctagaagtacaccgtcaaagaactgccataaagtatcggttgaaaaaattgtttttacaatatcaactgacccccaattggttactaaagtaatcactacaccagctgaagcaaccactactcctgtaccaataacttgaggggcaagtttcaacactttcttctgccatggaatctttgatgcgaccgttttattaaggactaagcttgcggacatgatgccaccaaacattagaccgaaagccaatccggctccaatcgacataataatttgaaaaggttgaggcgaaccagcagtcttaacatacatcatcacaagagctaatattggtccaacaagtgctccaattcccatgccttcaataattcgtttgttttcacgagcaaatttttcattattcattgttcttacctcaaggaaattttcagctaattaaacaaatccgaaaacttagtcggaatgttgttcttggcgaagtatttcttgaatgcatccccaaaactcaattgatctttttctctattttcaagcaaatcatgaacagctaagaatgctgtaacggcgtaattaacggctaaaatgattaacaaaccgagcacaatataaattaagtacagcattgttctttcctccaattcagcgattatctcccaggaaataatcttttatccttttaaattaatcatatccccatcatttatgtaaaaggtaaaaccgtccaattctgtcatttttcggactgattttgcattttattcttcatcttttttataaactaataaatcccctggttgacaatccaagacttcacagatcttgctcaacgtgtcgaagcgaacgccatgcgcctttcctgtcttcagaatcgacaggttagccggcgttataccaactttctctgccaactcctttgaagacatctttcgcttcaagagcataaaatctagtgtcacttcaatcatctatatcaacctttctaaataatcgagtctgcatcctcctgaaccttcattccgtacttgaataccaagtagactacgtatagtactgctaggaaaagcaaaccagttgtcacaccacttgggtatagtacattattcgaggatttagcgaaccaagtgcggtgagttatgaaaataatgtaatctattattgaaataagggtatatccagcaactgaaattaataatttcttgagtaaattcaaattactatcagcaaagtaaacttcttgcttgatattcttaacaattaatctggcatatcgacagattaaaaaggctgcaacgctcatcatgatcagttatagcaacacaaccactattgcaccgatatagttatcaactgatacgccttttatacccctaccactttcaaagccagcacgaaaatccggattatgtataccaaataacacaacacctcccataacgatccacataattattcctatcacacaaaatatttggtaaatccaagcaaaaatcgtaagcaaattcaaaattaattttttcatttttctatcctctcaaaatatggatgattctgtatatagcactgccaattacacccgttactccaattactaataatgtaattctaagaacactccatgttccgcctaagttagcaaacactaagattgccatcattatcagcattccaataattgaacctatctgtcttttcttttctggaagcatatctatccctctcttccataaaactatctatctctttctcgtcttttataattattgtattacgataatttataattgcaatacagaaataaaatatttttttgagataataaaaaaataccaaattagtcgttaaactaacttggtattatgttttatcttccaagctactgctttttacttttcttcttatagtaagagttcatgaaaatattcataaagataacaaaggctacactttcaactatattccaaaatactgttccaaagcttaatgttttgtactgaaaatagtcccataccaatcctattaacagggccaaaataccagcgatgatacttctgtttctaacttggcgctcggttaaaattttatttttcataatttttaccccattattatcatatcgaaaaataggaaatctattaaccgaattttctattttttaatattatctatgtttatgttttttatgtctattttgtttggcgaaatctttaacagcgccttctacacatccttttatcataccacttccgctagggagcgcatcaatgaaacccgataaacatgatccacctacaccaagccagttagtgccaccacttactttttctaattctttataattcatttctttcatcataaaagttacctccttttttacaaatgtgatacacaagaaactgatccgctaataatacccacattagcaccaaatatagctccacctactgtaccaattggagtaccaaatgcagtgcctgcaatgccatattttagtccatccttcaacgctcccattccaatagctttagcacaatttgtgatttttctacggcgtcttgctttaccaccgttaccaccgaaaacagctgacagttcttcataagttaaagtttcaaatttgttcatgtttttcccctttataaaacttctaattacaattttcataagtgaattaagttttacctctcttcaacttacacactaataatacaaaacaatttaccttcattggcgtataataccgatttagcacgaaacaagatctatttggaaaatatttaccaaatcggccaagttttcgtatattagtaatttacaaaggattcttattaattgttacgctaacttgatattctgttttataaatccgaaaactagtaaaaacatagacacaatgcacttattatgagaatggctaacaaaaaaatcttctcatagccaaggctacaagaagattgccatcacattaatgcataaactgatacgcacgctctttactttaataaaacatgatcaattatacgactataacatagccactcaaaaccaaaaacttgagtcgaaatcaaataatcatttttagcatagtaacctacgaaaaaaatcacaagtttcataggtttctttgcgttatcttctaagtattacgatattttctattggagatatttttagcctattcgcaccagtatttttttcaatacttatctactagttattatctacctctatgaaaagaactttggaaaaacttaggattttccaaataaacgtctcgtttatgattaccacctttcttactgtataaaggtagcatgtgttcagtatcagttagaccaatatcatctacagaacctgacccacctaaaattccgcttaaaagtacttcatctttagaaataatgattcgtttcatctacttttcctccttagttttctttcctaatgaaatgcccaaaactaaactgattaagatactaatcattccaattaattgaccccagatattatccttctcacctgtagatggtaaagactgagtagaaccatttttaatagtgtcattttccaatcgctttaacttagtaattctattttgattgttcttaacggcactataaggcttgctttgcacttttactgaatcaaattgtttattttctttcacacttccgtgtttttcactaactgctgctagaataatattctttttatgcgatttagctgttttcttgaccttagtggctacgattttaggttttactggcttcttcacagttttcttcttagtttcagctctaggagccgcatactcttgattacctgtcgtaactttagtcagatctgcagtagagctagcaacatttgcagcattctcaaatacgctattttcaacaaagtcagtaatagcaacgtcattgctagactgtgtttgatcatcttcagctacagtcacttcaggtatttcattactttcagattcagtagtattatcatccttcggttgatccttaattactgcctgttccactaatttattagctgcatcagaatacaaaaagttatataactcttgtcccgtcttttctccaccgacccatgcactaataatttttccattaataaatctcattgtagttggagtacctggaataccaatttctttgaaggcatactcatgtgctccttcttcagcatcaatattgaaataaagcagcttacctttaacgatttcattgaaatcttttaaatcaggtgaaaattgtcgacagtagtaacatgttggacgaccgatatacataagatgttcttgattatttttctctgctagaagatcttttacttcttgcatttttactctatgaaaatcttttacattgttctcataatcttcaacagatacctcatcttcatcatcttcactatcttcctcatttgcattattaggatcttgattattagtattctgtgactgattattttgatcttcagaagctgctggctcttcttcctgcttattttgagtttgagctgcttcgttcttactactagttttctgctcagattcggaaacatttttatcatcattttctgttttagatactacttcacttttattctcttgagaagtattaccttcatccgcatgcacaatagtactattcatcatcaataatactgctgggctcaacattaacattaatatttttttcttattcatagatcttcctccgtattttttataactaagaaaaatatatcaattatcagctatctttttggttatcagacttattcagtacactttttgaccaaatcagttatcaaaataattggaatttgattctaactaaaaaagagcttttcagctccttttaattttggttaagaattttatccttaaaatattcaaaatatgtactcttacctgtaataatagttgcgttgccttccatcccatatttcaaatttttcttggacttggccttacagattacttcatagacattatttccgcgtagattaatgggatatactccaatttctttcacttttcctactaatctatccattgttccactagcattagctacctgaaaatacagtgtttggcctttttttattgccccaattttattacctgggaaataagtaactacattgaccgttcttttagccttaatcatcggaaacaagtgaactgtattctcctgtttatcatcaagatgaactagccatttttctctatttcttctaacaatttgtccttcatgatagtttctattggcaatattaagtgtattttgtggttctacaattccggtagatgtaactgtactttgtctagttgcaaagaaagaaccgactattaagatcagaactaaaattgccataggaataataatcatagttgaaaaattcttgaatttataggaatagtattcggtactctcatagtctttattattcataacgttgctcctaattctcaactaagttatagtaaaagccatgtttctgcattaatttctcatgacttccttgctcaacaatttgaccatgatctacaaccacaatattgttagtcctttgtgcaattgctaaacgatgagcaataaaaataatcgttttatcttttaatttcattaaattatctactacttttttctctgtaatcgtatcaagcccgctagtggcttcatcaaaaattaaaattttagccggtgacaataatgcacgtgcaatagttagcctttgcttttgcccaccggataaaatcttggcattttcatccatcttggtttcaaactgcagtggtaattgttcgatttcagactcaatttctgctatctgacaggctttcaatatatctttttctgtaatatctggtcgactacctaagagcagattttctttgattgttcctgagaagatgtatggtgtttggggaacatagtttacgtatgaccgtaagacatgcttatctactttagtagaattaaatccattaaaagttaacttgcctttgcttggagagaagaaatcaactaaaagtttgaccatagtagacttacctgagccactcatccctacgattgccaacttatcattgggttcgatttttaaattaatatctttcccggatttaaaattgaagtgcaacactaagtgttaaacaaaaaggccatgaagacctaaacttgaagtgacgaaaaatcaagaaaggaagatcttcatgaccaattcaaattctagcatttctaagcactatcatcaattaaccagcgtacaacgtggacaaattcaagcaatgctggattccggcataacttcccgtactgttatcgctcaagaagttggctgccataagtcgacaatcagtcgcgaaatcaaacgcggaagcgtcctgcaaagagacagcagctatttattgtatgagcactattacgctgatactgcacagatttattatgagaagcgtcgcaaaaactgctatcagcgcaatccattgaagcattatgctgtctttttgagaatgctctccagacgctttaaagctaaatttgatgccaccagcatcgatgagttcgttggtgaattcaaaaggactatgccaggctacccttgtcccagcacaccaaccgtctatcgctatattgatcagggcttgctggacataagcaatattgatctgcctatgaagctcaaaagacgcaggaacaagcgtcatcacagccatggcggtcacgctttgcacaagaagcatcttggcaattccattgaacagcgtcctaaagagattgaagacagaaaagctccgctgcactgggaaggagatctggttaaaggcgtcagacgcaagaatcagcctgctttaatgactttgactgaaagaaccacacgctttgaagtagttatcaagattcctgactatcgggcaagcacatgccaaaggctgcttcaaaaggagattgacagacatcctgcctggtttaaatcaatcacgtttgacaatggctctgagtttgcggatatgaccaagatcaagggctgccagatttactttgctcacccatattctccatgggaaaggggcaccaatgagaactgcaatggtcttttgcgtcaattcttccctaagggcaagagcatgaaagacaagtcaaaagcttatgttcaacaggcaactgatgccattaaccacaaatatcgccgaatcctccaatatcacacagcagaggaactcttcaagcaatatatctcttcataacctaactgttgcacttaatttgacaattcaggaattaatatcttttaatacatcgactccatagccataatgatagtcaacatgatgatattcaatctcacctgctaattgcttggcatccctaatctgagcatctttctggaactcactcttaaccatgtatacttcattcaatcgattttgtgctacattagctgattgtagagttggttgaagattaataatgctctgaagtggatctacaaaatacgatagtaatgcgttgaaggtcattaattgaccaatgctcatctgcccgttcattacaaccttagcccctacccagaggataattacattgagagataactgaatgaaggtctttaaagctgactgcaaagattcagttttactgtaacgaaaagatttcttgaggtaatcgacgaattgactatcaatcttacgataacgtgtttgttcgctatttaaagctttgattgtttcaattccttgaatatcttcaattactgaagaacttaagacagcattactctccatctgatcattattcatcttttcaaatttcttagaaaagctaagaatcaccactgcataaattggcaaagacagtagagtaatcacaaatagagtggaattttgaattgccaaaactattcccatcacaattacaattgaaagatcaagaaataatgaaataactgtactggcgagtgcgtcaataattcgactagcatcagagaaccttgaggtaatttcccctgttctacgagttacgaagaattccattggtaattcaaaaatatggcgaatgtattgtaagttaagatcaatacttaatcgctgacctagaacatccaatagaaaattttgcccgtaagaaaagatagagttgaaaacatatgctatcaataaaccaatagctaggatcgacaaagtttggtatgtaccgctaggaatataagtatcaattaagccttgcaagaagtatgagctacaaatactaatgattgtcatcaaaagagcagccaaaataatattagtgactagtttcttttgtttgaacatgtatggaaatagtgaccacagattttgctttttctctttgagtggctcaaaatcatcatttgggaccataaaaagggcaattcccgtccattcttgagaaaacttttctttagacattttcgttaaaccaacgctaggatccggatcagcaatcactaaataatttttggttgccttaatcacaacataatagtggagtaattcgccttgctttaagacgtgtacgatgaaaggatattgaatgtctgcatcaggatcaaacaaggacatgtcagctttaactgcttcagtttttagattaaatgcttgtgctgttttaactaagcccagagcggtagtcccttctaaattagtgcgggctgaatgacgtaaatgggctaaaaatactctagaatgatattttttaagaatcatagctaagcatgcaactccacaatctgattcgtctacttgtggtacataaattgatttatactgtagtaacatcttttccactcctcatattaagttgaatccattatttcatgattggaaaactaaatgtaaaaaaataccaaatcggttattctcattaccgattcggtattttagttttctaactagattgagctactcaactttaatattttcaaatttatctacaagctttttaaccacggctttatacgatctagaataagttaccatctgaccattatcaaatataataatgcgttccttcgtgtcaattgcactaatgttcttaggatttaccaaagaagattgcgaaacttttgccaagaatgggttttctttatcaatctgagtaatatttgccttatactcaacttctccattctcagtaaccatatgtactttatgctgtgtagtactgtgttcaatgaaaagtatatcgccttcggccactttacatacgcgccgaccaatcttataagtaaagtcacgttgactaaacttaattctgttagataaattatcgaaggcgttacgtaacgtttcttcgatacgttgaataatcttatcagacgacatagacttactaatataatcaattgcaccgatacgacggcgatacgttaatggagcgtacttatcgtacgccgttacgaagatgatctgggcattttcgtcattcttcttgatgaattcagctaaatctacgccattcttagctttagactctcgacttaattcaatatctaagaagtagataccattcttaatatcatttgtgactatgtatcctaccgcttgagcaaaatcgttagcaacaaacgtaacagattcatttaattcagcgtaaccttcattatcatctattaagtcttgaatagatgcattgatattcttagcaatctgattagctaaatctttatcgtcatcgcatacaatgattgggaacttactcatcctcttcaccatcttccgtatcaattgtcatataaaagtcgaaccagccgtcttgaattgtataagaaatagacatatcaggatatttactctcaatttccttaatattagctaatccaagccctttatggtctttcttagtagtaaagccacgttgttgaatttgactagttgagatatttttattttggattttatttctgatttcgaactcaaattcatctgggtcatcagaatagaccattatttggacttcagcacttcgaatatcatgcttttcggcaatcaatgctttactttcctcaattgcattatcgaaagtaatgccaataatacgtactagatcgagttcatctacatggtctggtaaattacggatattatttcgacattcaaaattatatggtatatccaaattatacaattctgttatctttggaataataatgctcttaattgatttaacgtaaatgtgatttaggtctttatatttaagtaaggctttagaatttaggttagtttcagtatatttatctagtttctgaattacttcttgaacgttaccttcttgcgcacttacctttaaagaattaagaatatttttgtaatcatgtctgaaggcgcgaagatcatcttcacttttttcaagataagaagcatattcttcaagctgatgctgctgttgctttaatttttcttgatcctttttatttaaaagtttttcttgtaccatcgtcatttcatgatatataaatatagcaaaaatagtttggataagaatatagagagaaaagaacaaagttaatggtgtaaaagatttgctttgaatatatatgatagagatgctcaccgtagaaacataggtataagctaatatgcctacgaaaattttattattttggtttgctagataattatatatttttccattacctagttttattgcaactatcatcattagtattagtaagaaacgtagtgataattggcctatcaaagtaaatgacataacctgagtgatcatatcagacacaatatcaactaataaatctaatgtgcatactaatattattgaaccaaatagtatttctaatgtattattttttctcaaatataatacaaaaagcaaagtttcgaaactgtcaaatcttttgtgtaaatagttctttctcgtaaattgattttttaattatttatttaatcaaagtaggattctaaggtgtcctgaacctgaccaaagcctttatgaattcgattgaaataacggtcattgtagctcattgcctgaataccaataaaagcatcaagcgactgttcagttggaaactctgccttaggcttagctttgcgcttgatcacattgttaaatgattcaatcatgttagtcgaataaattgaagctctgatctgcttgggatagttataaaagaccagcagatctggttctatgtctttcaagcttctgataacatggctgtaaaccttgccccatttggtatagaagtcatgcaggacagctgtggcttcttctttgtttgtctgttgatgcacctgtttgaattcgttcatgatcttttcacgatcgtcgacgcgtactttagcgcagatattgcgcatgacatgaaccaaacagcgttgaaaatgagctttaggataagtcctggccaaggctgttttcatgccaacaacaccatcagaaagaaagagttcaacttgcttcaagcctctggacttcatgttttgaagcatctctgtccagacttcaatgttctcactaggagcaatgcagtagtcaatgacttccttatgtccattaggtttaatgccaatggcaatatagactgcttcacgctcaaacgtttctcggcgcaaaggaaggtatgtcgcatccaaatagacgcagaaaaacttgtcgcttagcttgcgtttgtggtaagcctcaacctttggaatcatctgcttggaaatatttgatacctgagctggactgtaatggctgccatacatcttttcaattagatcggctatttccctggtggtcacgcccttggagtaaagcttgataatcatgctttccaagatatccgagtgctgcttgtagtcaggcagcgtgtgctgatgaaattgaccgttgcgatcccgaggcacttgcacttcaattgggccaaattgcgtatcaactttgcggaaataagcaccatttctagagttgccagtattccagccatttctggcatagggatcatagcccagaaaggcagtcaattcagcttctagcaagttattaacagcctgttgtagttctttgcgcaataaatcatttattttgtctggattgaatagagcttgagcaaaatctttggtaaaatcattcatgaaggagttcttctttctgtatgtgttttttttgttcaaaccaatcatacgagaaaggaactcctttttctaatgtttaaagaaataaatttaaggaatcattcatccttacacaaactattttacagtctcaaagtttcaagtatatttgtgaagattacgccaatattacctatagacaataacaaccctaaaaaaatattagcaatacacaaaaatagaatctgtctctttttagatcttactcttgatatttaaaaaaaacaccatacatctgctaaactagaaaaaacattaagaaaaagaaataagactatcttttccatatattattccaaagttttttactcaagaaattaaaaccaacatgtgccgtgcttccaccaacaaccttagtcaattcttcttccttcaaaacagtctttttaacattttgcttcttcatgatatttcatcctttcatgattttatactcaacttgtttacacctttaatatatcatgtacttttaagtaaattaaaaaagataccaattcagtcatactttcgtaccgatccggtttcatatttcttcaaacgtaaacaactgacaattaattttcttagctaattcctgacagctatccgtaaagccagatttggaaaatagataataatgcttaagtggatacttgaagatttcactatttgtaatcaatttttctaacacactacgagagatcggttcattcttccatttacattcgccgaaatatccatcacgttcatcgtcagagaatcctacaatatctaactcaacttgttgatgtgttctcttatcggttccccaccaattgcccaagtggataaacggattaggaacaattttttcattcatatcctgagaccacatgaagtcttgactgtatttttcaaactcaggtcccatgaaatcagatagacccttttgtacttttacccaagcaagatcagttaagccacgctcaattagatcggtttgcttgccaacaaaggtataccagaagcggaacatcccgtcacagatacgataaacgatatttttgcttttactcttcttttgctcagtaaccggtaactttttctcaacaatacctaaatctatcaaattattcaggtacgtggttagcggaccagtttgtaagtgggcggattgcgcaattttactatgcttagaagcacctgaagctatcgcattgataatcgaattatagttagttggatcgcgtaattcctgttgtaacaagttattaggctcatcaaataagcgacctgatttactcaaaaagtttttcttaatattatccgcaactgacatgctgtctgacatataactcaaatattggggtacaccgccacaaaccgtattgatgataaaagcgtcctctttactgagttttggtaacatttcatgtgcttctgataatttaaatggttcaagctttaaggctaaagtgcgacgaccatatagtggactttggtagcctaagacttgtcgttccataaatgacatcgatgaaccacataaaatcaaaaataggttagtttctttgaattcatgatcaatgtaggattgcaacattgaactaattgtagggtaagccttagccaaataaggaaattcgtcaataactaaaattacacgttgtttttgagctaggtgtgtaatttctttaaagcattcctcaaaatttgcaaatttttcttttccaccctgatctgtatttttaaaaatactaattgcatcagaaaaacgttttagattatcttccgcattttcttcaagtgctacataataaattgactttttatcttttaaaaactcattgatcagtgaagtctttccaattcttcttcgaccatagatcactgtaaattgaaaatcattttcttgatacgcctgattcaattgctctaattcttgatgtctacctacaaacatagcgcactccttttcactacatcgtaatatactacattatattatactataacacgatatagtataacgtaatgtacgtgtattctatttttgtaataaaaatggccgttacttagagaaatagcgaagatcattaaattttaacatgctataataacaatagaacaagaataaaaagttttagcgtgcgcgttgaggtagctcctcaacttagtcattaacgtgtggctctgctttggcaaagcttttttgttatgttaataccctacaaaaaagaccgtgcatccctgcacggtcttttcatcttatcacatctattttctaacgtattcgccgttcttgtacttaaattcaatcttcttgttaggcaattgaaccgtaattctgcgatatacaggaccgaagccgtgcttttcaagcttaactttcacgctaccgtccttgtttaccttaaccttgtacaagttgtattcgcccttttggtacttaaagtcagttccgttatcttgatagtgaacgtacttaccctttttaccaaatagtctaaaggtcatactctcgtctggttcaccagagatgtggctaacttctttaccccatggcaagatagtgttcttcttgataaacagtggcaacttgccaattggtgcatcaaccaaaatcgtggtctttccagcatgttcaacaccattccagaaatcaatccattttccttttggcaaatatacggcacgcttggtttgaccttcttgaacaactggggctgccaaaatgtcctcgcctaccatatattcatcattcaagttatacacctgtggatcattttcataattaaggacaagtggacgcataattggcaaacctgtcttagtttcacgatagaattcatcgtaaagatatggaatgaaacggtaacgcagcttcaagtacttacggtaaattgacaaggttggttcgccaaatatccatggttcttgtgagcgagttcctagagccgcatggtttctgtacaatggactaaacaatgcgccttcgatccaacgagtcaacaattcaggtgttgtgtcagcaccaaagccaccgatatcagtaccggcaaagctgaatccactcatacctaagttacataattgtggaatcatcatttggacatgtgtccataaactttggttgtcaccagtccaaactgtggaaaacttttgcgttcctgcatatgctgcacgcgtaatgacaaatgggcgttttccactgaatttcttcaaaccttcataagttgccttagccatgttatgaccatagacattgtgcatcttcttatgagttgaagcttcttcttcattatggaagacgatattttgtggaatttcacccttgaaggatgcaggttcattcatatcgtcccagatacctgaaacaccaaggtcaactaagtacttgcagttcttagcccaccacttacgtacttctttgcggccaaagtctgggaagactgaatcgccaggccaaacttggtttacataaacagtgccatctggagcctttacgaagtagcccttttcgataccttccttgtagatcttatagtcatcatctttcttaacgccagggtcaataatcgtgattattctgaagcccaatttacgcatcttagctacgaatttctctggtgactcatagttatcttttctccaggtaaatactctgtagccgcgcatataatcgatatccaggtgtaaaacgtcacatggtaagtcatacttacgcaagttttcagcaatcttctcaacttgcttttgactgacactgtagccccaacgtgattgttgatagcccaaagtccacttttgtggcattggtacacgaccagttaaataagtgtagttagtaataacttccttgagtgagtcaccaccgatgatgtagtagtcaatattgccatcaaccgctgagtagtagtaatagtcattactttccttacctaagtcgatgtggttgcgataagtattgtcaaaaaagataccgtaaggatgaccattttttaatcctaataaaattggaatcgacttatacaaacgggtaaagctctctacttgcggatcaggattgtcagtattccaattatcataagcatagtggcgtttgttcaaatagccggttttatcacccaagccataaaattcttcgtcatctgctagtgacttgaccacttcataataatcggcgtcatgctttcccagtaatttatccacatcatggccttcagattcagccagcttcaaatgttcctcatccatctgtcggtcaattggggttcttttcccccgataatctacgaccaatggattgccttgttcatcaaagacgtcaattttttcatcatcataagcttttactatcaacttagccgtagctatttcaatatgatcgcctttatttttaactgtaaaatcagttttaatttctttatcgccttcgatagcataagaattgctagcattacctcgatcttgaaagaatcgcataatttccggtgttaacacggtcaaaatcattggtccattctcatagtttaaggtaattttttgtccatctttagtaaaatcagtaagttgattaatcataatttacctctaaaaaatcaaaagttatgtattcgctttcaattttaacacaataagctaatcaattgggtcataccagaaaaaacaccttcagaaatttttgtatttaaatacaaaaaaactgccttacggcagttttatttaatttattccattggaaaaatcttatctggattcaaaacataatttggatcaaaaacatgcttgatctttctcaaaagttcagtgtaatcatgaccatagaaatcctcaaaccaatctttgcaggcataaccaataccatgctcgccagacatatttccatccaaagctttagctgtcttataaagttcggtaatcacataatgactcttttgctcaaactcttcgtcactcattgcatctgagcaaagataaatatgtaaattaccatcgccggcatgaccaaagttaggaattcgcataccaacctcttgttccaattcatcaactctatgcaaaacatcaggaatatgattaattggcacacaaatatcaacttcatccatctttggcgtagacttttgaatagccaaaagcaatgcttcccgacaagtccaaatcttctttgcttcctctgaattagcatctaaaattaccgcatcagctgctttaaacttcttcgttgctgcaagggcaagctttaattccgcatccaattcctctttagttaaagaatcaagccctagaataatgaagccatcgccatttgcaatcgggaatttttcatcgtaatacttttcccagagactaatgacttttctacccataaattcaacggttgttggcactacaccagaagccaaaattgctggtactgatttaattgctttatccaaattaggaaacggaataattgcattgatcgattgtttaggacgtggatataaacgcatggtaacttcagttactacacctaaagtcccttctgagccaatgatcaggtcttttaacgaataacctgatgaggacttaactgccttagcgccaaatttgtaaagtttaccatcagttaaaacaaccttcaattcgcggatatgttctcgagtaacgccatatttaattgctttcaacccaccggcgttagtatccacattaccaccaattgtagcccaatgcattgctggagctggcatataagtaaatggtttattggctaaatattcttcaatatctttcaaccgaatacctgcttgcacagtcatcgttagactttctggctcgtattccaaaaccttattcattttcaccatatccagtgaaatgccaccttcaacggttaaattgccacccattagaccagtcgaattaccacgcggaacgataggaatatgatgatcgcttgcatatttaacaacgttttcgacttcttcattagtttcaggttgaattaccaagtaaggcattgctctaaccgtcttaaattggtcatgatcccaatgaacagttggcttagtaatgaatcgctctggatctgagataaatttactcaaattatctatatctgttgcagttaattttttaaagtccatctttgacacttctttccaaattgaaacatcctatattaactaatgtatccgcttttgtaagcggtgtcaaaaacaagaactgaagatttttttatctaaaaaagcaaatttccatactacctcactttaaaatgcgatagtatcgactttcatttaaataactattacacaaaatatgaaaataaaaaaactgccttacgacagtttctagttaaataaatccgacatcttagttggaatattattgtttttcacaaaatactttttaaaagtaggtaaatctgcattttcttttttcacatacatatcatgtaaagcccaaaatgcagtgattaacaaattaacgcccaagacaattaacataccgattaaaatatatactaagtaaagcattgatctatcccccgctatatcgtcacttgacccagagtcgcatcttcaatgaagtatctgacgaaagcttgattgaagctcatgccctggccgttgtaaacatgccactcttcgcgtttggcacctacagttctaatgattgaaattactgtgcaaattaccaaatatgcgattagcacgttaaaaattattttcattaccagcatgtctacacttcctctctgtactactcaactaatacactaatatttattagtcaatttgtcaacatcttttagtatttacttttttctccccaggtataaaaagccatagatagctggtccgatcactaccgccccagctatagaaactataatcactgcaataaagcgaggcatagcaaaaaattccgagctaaatttcatacaggcccaggccccaaagaaaaaaatcgcccagccaattaaaattgaaattagcatatttaaacctgaaaatttaggtttagagtttttattgttcatcaagttttctctttcataaaaatattgtgccacaaattgaaggtcaataaacaaaagtgacagattcggtcgttttttagacttatttggtaaaaaataagggagattaagtaaaatatggcgcttaatctcccttttgaatcaataattatttgcccataagacctgaaaaagccattcctaaggcagcaccaccacatgcacctgctttagctgatacgggacgagcataactagtaattgcataatgaaacttcatcacatcatgtgacaatttaccctgccagcttaatggatcaagaccaactcgaattaagttgcagacataattagctgattcaccattttctaactcatgctttgcatcaagtaggatttttctttcttctggcttagtatcttcatttactagtaggtcagtaatattacttaatagccattgttttaaatcatctttattttcttgatacatttttatccctctttttcgactttttcattaatatcaggatgcatccctacaaccattttagaatctttcatgttcttcatcgattcatttattttaataaaaaactctgcaagtagcagagctttttacctcattgcagagttacttatacatatacttagcacatgcttttttagaatccataccattacgaatcttcaaagctaattcaatcgatacatccgcaataattgattgtgggtcaatcacattgtaaggatgatctggtgccttttcctgagctaacgacaattctgtacatcccagcaagattacgttgcagccataatcatcatgcattttttgcaagatctggtggtacaatttaccatcaaccattcccttttctttaatatcggaataaatgagcttattaaccatcggttgaatttccggaccacctaattctgcctcacggtgaaccgcatgaatttcatccacatacaaatgatcatagattgacccttcagtcgcaatcaagccaattttcttttcttgtgggtatttttcaataaattgatgcactgctattctcatcatgtgtaaaaatggaatatcagtcaatgcagccaaatcatcataaaaatagtgagcggtattgcatggcatcacatagaagtctggtcccaatttggcttggcccagaacatcgtcacgtaaatcatagaaaaagtttggtttagtatgatctttaatataagccgttctatcaggaatttgtgcatcattaaccaaaatataatttaaataatcttggtccttagctatttttacacggtgattaattaaacgaacgtagctttctgtggcaatagttcccatgccgccaataatactaaagaagtgtttcactattttcacttactttctaaagtgttcttcttgaccttccaactcattaattacctgctgtgcaaccacaatatcagatggatatggggtatttactccgcgaattttttggaaagcgtcagcccccttaccacagattagcacaacatcatctggcgtagccatggcaatcgcatcatgaatggccttcttacgatctaactcaatagtaacgtcgcacttagagtgatctattcctgaatcaatttcttcggcaatactctttggatcttcaaagcctggatcgtctgtagttaaaaatgctttatctgcgtatgcagtcaaactttcactaaaaccgggacgacgtgacacgcctttatcaccaggagctccaacaacaacaataattttaggatcgttgaattcgttacgcataaatctcattaaagccatcattgaggccttattatgagcgtagtcaactacaaccatgccgtgcttctttgttctctcggtttgcatccggcctggaatagtaacatcgcgaatacccttcgcacattgatcatggttaagtccagccaagcctgctccaataattgcggcagtaccatttgactcgttgaaatcacccagcatctttaaagtataatcaccattaattggtaatttacgtgccttatcactagcacaaactaaattgaaccgagtttctttcatatctaattgttcagaagagaatctgaaatcaattggctgcttcaagtctggattttcaaaattatcgcgggcaaacaaataaatactatcggggttggtagtagttgttgcggcagcgtagacttcatcaaagtgtgcagtttcagcgttgataatacatttacgtgagttaacaagcaattgtaatttgcagtgcaaataatctgcaaaattagggtgttcgttaggaccaatatggtctggactaatattcaggaaaaagcctaaatcataagttaaaccgaagacacgatttttcttatatgcttgactagaaacttccattaccaagtgagtcatgccattatcaacagccgttctcatgtctcggaataagtccaaactctctggtgtggtcaagcttgacttaaagctatcttcaggcttaggaccgaccacatcattaactgaagaaatcagagctgtcttaccaccatttgcttgatcaagcatccctttcaaaaagtatgctgatgtagtctttccctttgtaccagtgaaagctacaacaaacaagtcatcttgtggaaaacggaagaaagcagctgacaaaagagccattgccttagaaacatcgcgcacaattaaagcgtgcattccttttccttctggatatggttgttcagctacataacaaatggccccattgtctttagccattgacaaataagttggtctaaagcctgctcccttgcagaagaacaatgtattagtttgaatatcgcgtgagtcataagacacatagtccattttagtagctactgtatcttgcactgcgcttgacttgagcaagtgatgctcttttaagatcaatatacaggtatttaaggaaatactcattaacttttctcctcgttgtatttaaaacatttcagtcaaaattataacacagctagtgtgttggtgacgctttcttcggatcaagtggcaaacgaataataaaactagtccacttttcgtttgattcacagcgaattgtaccatggtgtaaatcaaccacacctttggtgatagataatcccagaccagttccgcctgtcttagtatttcgcgaagtttctacccggtaaaaacgctcaaagattttatttaatgatttcttcggaattggtgccccattattttcaacgcgcaactctacttcacgtttgttgactaaattggctaccaatttaattttagttgcccctgtaccatacttgaaagcattagaaatcaaattattgtaaacgcggaccagcttttccgcatcagccttaatcgttagattctttggccgcgcttcaatctctatttcaatgccatttttttctgcttctaattcaaagccggccgctacctgctccaacattgaataaatatgcaaatcattcagatttaacttagtattggtcgactttaaagtagtatattcaaacagatcgttagccagtgctttcatttgttctgccttagtataggcaatattgacatactttttctgatcttctggcgaagtcactcctgcttttaacaaaccaagataaccaataattgatgttagcggcgttctgatatcgtgcgaaacattagtgatcaattcatccttagattgctcaattgcccgttcttcattaatcgaatttacagtactatcaaccaacgaattaatcgaatccactactcgttgcaattctggtcgtacccgaaaattaatccgatgatcaaaatgaccattagcaatatagtgaagttccaaaataatgtgacgtagctgcatttggtgatagcgtcgaatcaagcgccagtacaaaacaaccaagtcgcccactcccattaagacgatgaatacgttttgccaggaccagagatgatagccacctgcaaaagtgatcgtcttttttagaaagtagattccgttgaccaggctttcatcctgcaaaatagctaagtgaatcagaatgataattgataaatttaataaaaacagaaggacgaccgttacgaccccttctgcaaacaattcgctcttttcggcgccagttagcttgacgcgttcttttttcatcttatgcctcgaccttgtaacctacgccccaaacagtttggatgacatcctcaccatcagtggctttttgaattttatcacgaaggtgtgacacgtgtaccatgacagttttagctgaaacaattgattcttgttgccaaacacgttcaaagatttcatcagctgaaaaaacacggttagggtgactagcaagtaagtataagataccgaattctaaggcagttaattggatagtcttaccatcaatagtcttaacttcatgtgaatcacggttaattaccaatggtcctacttccaaaatatctggtttttcattcttaacttgcttttgacttcttctcaaaagtgaacgtacacgagccattacttcaagtggattgaatggcttagaaacatagtcatcagcaccagtgattaagccttgaatcttgtccatatcaccggttttagcagaaacaataataattggaatatcggagtcttttctaacttccttaattacatcgattcctgacatatttggcatcatcacatccaaaatcatcaaaacgatatctggcgtagtggtcaatttagtaattgcttccttaccactatatgccgcaacaggttcatatccttcatttttaaggtagatacttaatagttctacgatttctttgtcatcatcaacaactaaaattttcacgaggaatgttcccccttcttgtttattattctctgtttttctatctacagtttagcagatatcatatagaatattttacacattttagaaaaatatactgctttcattatcctttttaaacaaaagctaaaaaaatacacgtttctccatcatgaaaaacgtgtattcattctatttactttaccttatcatcatgcaatttagtttcgacataaacgcagacgataaatagcaaagcaaaacagcagatcttaggtgctgttgcataatcaagcatgctagcaaaaccgaataagataccatctggaacaacccaccaggagccgatcgaagaattaaaggtatcactaactgtcgcaaagaatgcaattaaaatcgttaaaacaagtaaaactgaagttaagatcattcccggccgaccaaaatctttaaaaccatgatcccagtagactatcactccaagcagtaccaataagattgataccagccatagactaccctttttcataataaaggccttctttctgcccttatcctaacacgattaagtagcagctgccttgtttaacgcttattgaatttccttcttgccagtgtagagttcatagtagtaacccttttgcttgattaattcatcatggttaccatgttcaataatatgaccatgatcaagtaccaagattaaatctgagttaacaatcgttgacagacggtgagcaataacaaaactagttctaccagtaagcaagttgtccatcccggcttgaaccattttttcagttcgagtatcaatacttgaggtagcttcatcaagaatcattactggctcatcagcaatcattgcccgcgcaattgacaacagctgtatttgcccttgtgaaaggtcgccgccatcaccatcaatcacagtttcataaccgtgatcaaggtcatggataaattcatctgcgtgtgataacttggctgcttgataaacatcgtcatcactggcatctggattaccaaagcggatattgtccataattgtgccagtaaagagatgggtttcctgtaaaacaattgaaagtgattttctcaaatcatcttttttaatgtttttaattggaataccgtcataagtaatcgttcctgaatcaatatcgtagaaacggttaagcatgttagagatggttgtcttacctgcaccggtttcaccaactaaagctaccttcattcccggtttggcattaatggaaatgtcatgcaagatttgatgatctggtacgtagctaaagttaacatgatcaaaaataatatgaccacgaacttgaaccttcttggttgagccatctttttgtggtacattccagtaccacttactgccgacttcatcgtttttcttagaaagagtaactgtaccttggtcagcttctgacttttgatcttccaagttgaaaattctttctgcaccagctaaagccattacaatagagtttaattgttgcgaaatttgggcaattggcatactgaattgcttagataactgtaagaatgaaccaatggcaccaagtgaaagcggagcccaactattaattgcagcagcaccaccaacaaaggcgatcaaaacgtaaagcaagttacccatgttacccataattgggaataaaattgtagcgtaagtgttagccttacctgaggcttgacgcaactcatcattatatttgtcaaagccttccttagattgtggctcatggctgaagaccttgatgaccttcaaaccattaagcatttcttcattataaccattgatttggcccagcttcttttgttggacttggaagaagtgacttgatctaaccgttaagtagcgcacaattccaaatgataaagcaaaaataatgaaggagaacacagtcaattgccaactaagtgaaaacatagcaactactacaaataataaactcaaagctgagttagtaaattgtggaattgactgtgaaatcatctgcatcaaggtatcaatatcgttagtataacgcgacatgatatcaccaaattcattttggtcaaagtatgaaattggcaagctttccatgtgaacaaacatttcgttacgtacacgatattgcactttttgagctaaaacacccatcagcatgttaaaaaggtaattagacaaaaaaccaatcgcatagatcccaaacattaccgcaattgcagtagctagagggccatagttaggaactttttctttagttaaaggcacaatataattattgatcaaacgttcaatgaataacgagccaataacgttgctggcagctgctagcacaatagtgatcatggaaacgatgagcatccatggacttgtactattaaccagtttcaataggcgcaataagattttggttctgctaccctttgtttgatttttacttttttccattgcttgatccaaattgctcacctactttccttgttcttcctggaatttagcgattgaactataaagttcgttagtcttcatcaattcatcgtgggttccgatagcttgaatttgaccatgatccatgacgataatccgatcagcatccttaattgaaacaattctttgtgaaataatgattttagtagtttctggcatatctttagccaaagacgttctaatttgtcgctcagtactggtatcaacagctgaagtggagtcatctaagatcaagatcttcggattcttaagcaaggctctggcaatagtaattctttgcttttgcccaccagaaacgttgttaccaccttgttccaccattgtgtcataaccatctggcatttcacgaataaagccatcagcatgggcgattttagcagcggcaattacttgttcatcggttgcattttcgttaccccacttgaggttatccttaatcgttcctgtgaacagcacattcttttgtaaaaccatcgcaacgttatcacgcaaggtcttcaagtcatatgacttaacgttgtgtcctgcaacccgaacggcaccagaagtaacatcataaagacgcggaatcattgaaaccaaggttgacttcgatgaacctgtttcaccaataatcccgattgtttcacctggcctaatgtgcaaattgatatcttttaaagcatcagccttgtccgcaggttcgtacttaaagctaacgtgatcaaagataatttcaccattggtcaaacgtttcaatggcttcttaggatcttcaattgttggttcttccgtaatcactgaccactggcacctgagataaccaattgcgtagtaatcatagctaaaatgtttaaactaaacaaaactgagtttgaataagtaaacattgaaattaattgaccagtttgtaaactaccgccaaccacttcttttgcaccgaaccagcagattgacagcgttgaaatattcaaaacagctgcaactactaatgcgttcaaagacataatcttttgtgcagtcgcaaacaacttgtaaataaagcctgatgacttcttgaattctttaatctgcggttgttcttggacataggtcttaacttcacgaataccacgtacgttttcacgcacaacctggttcattcggtcataccctctaaaaatcttaggaaagtatggataagctgttttaataatcaaacccaaagcaattgcaaaaaccggtcctaaaactgcaaagattaatgataaacgcggactaataataattgacataataattaaaacgatgaacatcattggtgctctaacagcaattctgatgatcatttgatatgccatttgcacgttgttaacgtcagtagtcaaacgtgtaactaaactggcacttgaaaagtgatcaatattttcaaaagaatagtcctgcatatggtagaacatgtcttggcgcaagtttgcggcaaaaccagcagctgcatgagctgagacataactcgcactagcgcctaaaattagcgaaataacggttaacactaatagcaatagccccattttactaatataggacatatcccccttcataattccgttatcaatcaaaattccgaccaaatatggaatcagcatttcaatgataacttcaccaataacaaacattggtgagagcaaagacaattttttatattgcctaattgatttgctcaatgttttgatcatagagacccacccttctattcttttattcaatctcgcaaataaaaagataaatggatcatctcccaatgtcattaagttaagacattgacaaattatcgacttggacttttaagatcattcatttgcgatttatcgcatttgaatgctcttttttcatgccaaataaacccaaatcttgtttagaaattaggctacacgatataaataatatacagctgatttgggtttgagatttcttttgtcttttcgtcctggtctgatcggaattgtgtaatgactaatttgaataagaatctttttaaagatttcagttgaagaagaaattatatacatagcctggatgacaaaacatgactgtttgaaattgatcgcatattgatacttgcattttttttgtggtacatatgcttgagcatcaatttgactgactgcgttaaacataatcatgtgggcatagatctccatttcaataaatctatcctgcttggaatgaaactgtacgctacctaaagcatatttcaactttttgaatgaagtttcaatgccccagcgcaaatggtagatttctttgatcctttttaagggataatcggctctatttagattagttagaacaacttcccattcttctttgcctgatttaggatcattaattctaaatttacaggcacgaaattttattgtacataactctccaaagtcccagctgccatctttggtatttttagaccgatattttatatattgacggtaatgatggttaaccaaatgaacgttttctgtagccttatgggtttcataataataattagaggtagtcacccagcaagctatatccttatcacactcttgattaggcaactcagctacttccttaaatgcgccatatcccgttttagtacgtatgacataataacagttaggcaggcgattacaattttcaatcatgttaaagccggtataacctcgatccatagtaactatatatggtccgcaatttagctttttaagcatttgaacggcggctttacgttcatccatctttgacttaggctgaaagatgcagtcttgataagtattatttaacaggtcatagagtgcattaacatgaatttggcaatatggctttcctttatgattgagatttccaacgatattctctgatttaggattccagatttgattaaaatcagacccatcaatggcaaatatacgatatttatgatcaaataactggatattaaataaattctgattaaatacagttagaatatgcttaaaacatgcgggtgaaagctgacctttgcgttggacataagcggaagtactgactactttatcgttatttttaatagctttttggccaaaagctctaaacaactcactggtcaaatcttttccttgcatattaatagtagttttaatgactgtagctgcatctaaaaaccgcttcctagtgaaggcatgaggatcatcgataaaatcatgaatatgctttccagtatcattgataatttgatcaagacgatctaaaatatttctgtgaagggctttcataattaacaccagctttctggcaataattttgaaggtttaataatttaatcagagggcgaaaaggtaggttcttttcgcctttattttatgcaaaaaaagaaccaaatcataatgattcggttctacagagattagattcaatttgtcaatgtcttaacttaatgacattggatcatctccatttatcttttttatctatattaagtttaagtatgtgcttatttttacggaaattcaattaacatgcttgcaaaacaggtaaattatttatgttgttgtggccttggtgcaaatgcggaaccaacaatattgtagtgctttctgaataaataacgtacaccataggcagccgccgcgataacgatgtcagctactgctggtaaaactgggttgattacgcgcaatgctgggatttgcaaaatccacatccagacaaacaaaacaactgctatagccaacattcttaagatcagcttaaccaatgaaggacgtttaccttgctgaggcattagccaatcattgtatttaaccatgaagatccccattaaaatacctacactggcaattgtcagaatccccatttgtgaattatacggttggttcttagtttggaataatgcaaggataccacataaaccaacaaaaattgctaaataaagcaatgcgccatcaaccatcaactgccaagttggtgtagccactggctttttcttaggatgaagcatttgttcagccttaattgctggtgaagccaggtaaagcccattggctggttgcccatgacgttgggcaataataatttcactgagcaagccattagtcatcgcaactgcatcagcacgtgacattgaaccttgtttttgcagttctttttctagacgaaaaacatagtcactgttcttgttactcaacttttcacgcaaagcttttggatcttcctgcttaattttttcatcctgagtatcaagctcagcttgcttctttaatttagcttgtttttcagtgttaatttttgtttgatcttgttctctctttgtctcttcagccattcttactcctagacgttaaatctaaattcaataatgtcaccgtcttgaacttcgtaatctttaccttcaagacgcagcttaccagcttctttaaccttttgcatagtttcaagcttgtctaaatcatcaaatgaaacaacttcagctcgaataaaaccacgctcaaagtctgagtgaataacaccagcaacttgtggagctttcatccctttgtggaaagtccaggcacgggtttcaggaccaccggcagtaaagaaagttctaaggcctaagatatgatatgcagcacgaatcaaacgatccaagcctgattcttctacgccttccatctcaaggaattctttcttttcatcatcagccataccagcgatttcttcttcagttgcagcagaaatacctaagcattctgcaccttcgctttcggcatgcttcttaacaatttggtaatacttgtcgctttctggatcagccattgagtcttcagcaatgttagcaacgtagataactggcttggaagttaacaagaacaagcccttaacaatcttttgttcatcttcgttgaagtcgattgaacgagcagcattaccttcttcaagtactggctgcaatttattcaaaacagccatttcagccttggcttccttatcgccttgttgagcaaccttctttaccttattgattctgcggttaacagcatcgaggtccgcaatagcaagttccaagttaatagtattaatatcttcttctggatcaaccttaccagtaactgaggtaatattgtcatcatcaaaggcacgaacaacgtgaacgatggcatcagtttgacggatgttttcaaggaacttgttaccaagaccttcaccttttgaagcacccttaaccaatccagcaatatcggtaaattcaaaagttgtgtgcacaatcttcttagcaggaatcaattcttgaattcttgccaaacgcttgtcaggaacttcaaccattccgacatttggttcaatggtggcaaatggatagttagccatttcggcaccagccttagtaatcgcattaaacaaagttgacttaccaacgtttggtaaaccaacaataccagcagttaatgacatttgttgtcctctttttctaaaatcaattttttatttttacttacttgtctattttatccaaaatttggccgagcgatacgatcttttggcacatattgctctttttttgcattaaccggatcattcgccttagttaatagcttttttagcttccggttaaactcgctgcgcggcatcatgactatgtgcccacaacccatacattttaatttgatatcagcacccatgcgcaggatttcccaatcattagtctgacaagcatgaggctttttcatttgaactgtatcagccaaattataaacaatttctttagccatctaaatcaacacctaacaaatcaagaatgcggttcaattcttcagtcgaagcaaaatcaatcgataaatgacccttacctttttgtgtttccgaaatattaacactagagccaaacttgttagctaattggctttcactagcgcggataaaagcagactttttagcagttttcttgctgcgtggcttcttagcattcagttcattgacaaccgcttcaactttacgaaccggcatcccttccttgactactcgcttagccagcgcatcaatcttttccttatctttcaaacttaaaagcgttctagcttgtcccatcgacagttcaccatgttggagtaaacgcttagtcttgctaggtaaagtgagcaaacgcaaataattagcaatatatggtcgcgacttacccatccgcttcgaaacttcttcttgcgttaagccaagattcttctgcagcatttcataagcttgcgcctcttcaagtggagttaaatcttcacgctgcaagttttctagaactgccacttccatcatttggctttcgttaaacttgcgaataattgctggaatagtcatcttcttagccaatttagaagcacggaaacgacgctcaccagcaatgatctcatatccattaactgattcgcgcacgataattggctggaaaacaccattttccttaatagaatccgacagttcttttaagctcttatcatcaaatctttttctaggctgataaggattcggccgaatatcgcccaaatcgagttcttggacttcttctgcctcttgaacttgaggctcatcctcaaataaggcttcaagaccacgacctaggccgcccttttttcttggctctttacttcttgagtctcttgtcatgagcttttaacacctcttttgctaaatcatcatataccttggcaccacgagattttggtgcatattctgtaattggctgaccataacttggggcctcagctaatttagtaattcgaggaatgatggtcttataaactttcttgctaaagtaggactgcacttctttaaccacttcagcacccaagttagttctggcatcaagcattgttaacaaaacgccttctacgccaagatctttattaaaatgcttttggactaaacgaattgtgttcaaaagttggctaagtccttccatagcataatattcactctgaactggaatcaaaattgaatcagatgcagtaaaagcattaattgaaagttgccctaatgatggcggacagtcaataaaaacaaaatcgtattgatcgctaattgcatctaaagctgactttaagcgtgtctcccgagccatcattgaaattaattccgtttcagcaccggacaagttgattgtggctggaaccatatctagctttggcgttgaagtatggtgaatagtatcttgaataggaatttcgtcaatcaaaacattgtaaatgtcctggtcaatctctgatttttcaattcctaaaccagaggtagcgttaccttgtggatcaatatccacaattaaaacgcgataaccacggtcggcaattgaggctgctaaattaatggtcgtagtggttttacctacgccacctttttggtttgcaaccgaaattacatttaccatattgttcatccttccctattacttccttttcaattcaattgtgatcttataatcatccggatctttattttctgttactttgactttaattcctgagtcttcggctaacttaaccgccttcttaatggtgttaatttgtacctttaagtctttaggaactcggctaacgacccgcttagcttcttttttagccttaggcttagggttaaagtaaacatccacatcttgcacaatctcttcagtttgtttaacgtttaagccttttgcttcaatttctgtcaaaacgcgatcttgatctgcattacttaagccgatcattgcacgaccatgacgagcggtaattttgccagcaatcaaagcttgctgcacattatcatccagcttcaataagcgcaatttgttagccacataagattgagacttacccatatttttagccaaagcagtttgagtcaaatcatttaattccattaaattagtataagcttttgcctcatcaattggatttaagtcttcacgctgtaagttctcaatcaaggctaatgaagcagcttgatcatcactcatatttttgacgatcgcaggaatagtctgccagcccaagcttttagctgcacgataacgtctttcacctgcaataatctcatattgctcgtcatcgccatcttcacgaactacgataggttggagcaagccatccttatcaagtgtttcagctaattctttaattgaatcatcagaaaattcacgccgtggttgatagcggttaggaaaaatcttgctcaattcaagatcttgaacctgtttattcttaggaatttcatcatcatgatgcataaaagaaaataatgacataatatacccctttctgtttaatgaatcggtttgcgccgcggggtgcctgcttgacgtggatactttttaggtgttgctttgactttttgaactaagattagagttcgttcttcttcgctctcaggtagagtcaattcttcttccttaatcagcttaccgcccagcaattcaagagctttttgaccatcatccaattcatcttcggcttttggtcccttgagggcaataaagtaaccatcttttttcaccaaaggcaagcaatattcactcaaaacactcatccgcgcaaccgcacgagcagtaacgagatcgaacttttctcgataaagcttattttgaccaacgtcttcagcgcggccatgaactaattcgacgtctttcaagtctaacttagtaattaagttctttaaaaaagtcaatcgttttgccaaagaatcaacaatggtaatcttcaattctggctgcaaaatcttgagcggaattgatggaaaaccagcaccagcaccaacatcacaaagagtggcaccatctttaaaaacatcgccaaaagtaaacagcggcgtaatactgtcataaaagtgcttaaggtaaacctcatcttcttcggtaattcgtgtcaaattgacatgctcattaacttcgatcaaataattaaaatatattttaaattgttcaatttgttggtcagttaatttaaaattgtgttttgatagttctaaaataaatttttcaggattcatttttcacccgtgaaaccgtgtttcacacctctaaatttaacgcaaaatgcattgattagtaaagatatttcatcttatcaattatgaagtatttttactcaatcgtcaaagttttgccgcccgcaaaatagggtataataaggcgcaaaggagttaaaaatatgattgttactttaattgttttagcttacttagcatataaaacatatttaggctataaaacaggctttacacgctatatcatcggtttaatctgttccgccattgtctttatggttgccattttcatgcaaaatccatttggtaattggctatacacacaatacactggagaaatgattaagactaactccactaacaacgtggaattaatgattgcacgctttgtcgctttctttattgttttcttcgtgggcaaaatgatcatgaagattgtcaaaagctggattcctaacaaaaatccacatgcgactaacttaggcagtattctcgacaatgtcttgggtgctctagcctccctaattgctagttattttgttgtttatgtagttttgtccatgttcaatgcactacaaaatccatggtttatgcagcaaacaattgattctagctttttgaggtttatcatttacaacacaccggggctttcaaacggtgtcttcaataatatctttaatattggcaaaactgtgggataaaatatatcaaaaaagatctgcttgtatcatactgagcagatctttattgatatgttttaactaaattaatactacatttatgaaccaacattcgatatacttattagcgcaggaagttttatgagcggcggctggttctccccccggaggtgaggcctatgggctacattgatgaaagggttccagccatgtcggtttacgagagtatctccttgatgcttttgttcggtacatttttgttggctttgctgacatatattgaccaccaccaaaaataaaaaacgccgctcaaacatactttggccagttattgagtagcgtttaacgtaaaatttaacatttgaagccgccgctcttaaagcgggctgcttggagtccctaggactcctttttctttagtcattatagcatatttcactaatcaccgaaattatcatattcaatatgttcatcattataaacaaagattgcaccaattcgatcagggttatcatgccaaccctttagtggcttgccagcaaagaataatcgtttgcattcaatttctgcttcaaccgatgttttggtaaaagtagtcacaccagctaaatcagtctttacaggatacccggttctaggatcaatcaaatgatgatactttttaccgttaactactaagtagcgctcatatgtcccactagtaacggctgagcattcaggcaccataactgacgtaatattgtcgcctcgcggctgtttaggatcttgcacaccaattgaccactggccactaattcttttaggcgaatcaccaactaacaagatattaccgcccagattaataattcctgcttcaacgccatatgcacgccacaagtcacgaattcggtcggcaatccaacccttagcaattccacctaggtccagctccatgcccttcattttaagaaaaacagattggtcactgtcatttaaaaccaccttaaatgggtcagttaacagcattctatctttaatttcttcatctttaggaacatgtgcgcctttaaaaccgatatgccaaagcttaacaactggtccaatcagagcattaaagccaaaattctcacggctcttttctactgccaatttaaccaaaccatacacagcactagagacctgtaccggatgttctccagcagcatgattgatatccattacttcagattcatctcgattaacggtaaaaatatcttcgtaatgatcaattaaatcaaatgatttttgcaatagatcacgattttgagtaccaaaaatctgcaatgtaattgaagttcctaaagcatgatgatcaccaaccacctgctctaatgctaaatctttaatcataattatttctcttccaaatataaatcacgcaacgcctcacgtagttctgtcgttacgccaattttttcttgtaaaaagttatcgaaactaccaaaattctgctcaatagcgattaatgaagtatccaaaaaagcatcagaaactgaacctaaaattcgcatattagcgcgaaaacaaagattctcgccctcttcttgcatttttttatctcttttggcccgatagttattaagcatataatttgagtacaaatagtcctgtctaattgtttccatatctacgccaagcagatataacaagactacagttaccaatccagttctgtcttttccttctgaacaatgataaagtacagcacctttttcagtattggccaacagctctaaaattttatgcaagctatgttgagcgtgttctttcaatacatgtgacttgtaacgctcacacatcattctaaagccagcatactgatcttgacgataagttgcgaatacttgggttaagtctttcttaccgcctttggtgttgtcatcaacagaaattggaatacagaaatgctctacgccagggattttgctgtctggacaatggtcacattcagttggtgaacgcaaatcaataatcttagtcaagccataattgagcaaaaactcttgatcatgtctcgttatgttgctaatcttgcccgttcttaataaccgatgcatcttgaccttacgtccctgatagccaacatatccgcctaaatcacgcggattacaaactttttctaatggcaaaatatttggtttcattaatttcatctctttattaagtattttgataaaaaagccggatagtgtccctatccggtaattttactatcacgtggtaagtcacgcaaaattatttgttagcttgttcaacaaatttaataaagttagccatcatagcatctagttgcttaatataatcttcattggtcaaatcgccagtttctttatcaaaattgcttgcagcaccgccaattaagatttcattgcctggcaaaacattggcactcatgtctggtgaaagcaagatttcacgagcatcttcttgcgcacgactagatccttgaataccgtatgaagtaccaacaactgcagccggcttcatcttcatcacattaggaccagcatgtgaacctaaccattcaagcgcactctttaaggcagctggaattgagtgatcatattctggtgtagccaaaattacaccatccgcattcttaacatcctcgatccacttcttagtaacatcatctggctcatcagttctacagaaaggcttaagttgatcgatttctttaacttcaatatcagcttgctcaccataacgcttagcaataaattttgctaaaaaacgattgaaagaaaatggagcgtttgtaccaacaattgctaaaattttcatttaaataagccccctacttagtaagttgtgcataccaatcatcaacttcatcaaagaagtgattcaaaaacttaagtgtacctgcatcggtcaagtcgcctttatcatcaaattgttttggtgccaaacccatcataaattcgtcaccagcaaagacatgagcactaaaaccaggtgcgcccaaaatgctcttcaagcgagtttgcgaacgagacgcaccttgaggcattggtgaagttgacacaataactactggcttatcatggaatgggtgaacagaactagaaagccattcaagtgcactctttaaggcacttgaaaccgagtgttgctgttctggtgaagcgatcaaaaccatatctgcatcagcaatttttttacctaaagctaatacgctagcaggagcatcaacgccttctttatacataggcaagcccttaacagtcgcaaagtcaaaatcatacttatcgcctaagtccttaataatgactttaagtaatttttcgttaaatgagttatcggcattggagcccgataaagctaataccttcataaaaaccacctttcaaaaatcctcttaattatcattatagactaatgtagtttaatttatgtcattttaattttaataacaacaagaaaaaacgccttcgataatgaaggcgccctctactgaatgaaaagcacaaatgattggtgaaatttctatgccaagttatccttaagcgaagcttcttcgtcggcagcaaacattgggttttcttgagtttcgctgagacgattgttaagcatagcatcgtggatttgagcattcaacacattgacgatttgagtttggctgaagcttgcaatctcattaacaatcaatgcagccatacctgtagtagaaatccagttagcaattacgatgtcatgaatcttttgatcatcataatcaacatcaggatattgttccttgaacttttcagttccaagttccatcaaagtgtcagcaatgatcttgctaccaaacttgccatcaacgaacattgctctaaacaagttaacatgagcttgagcaaaatcaatgtatgacaaatccaagtcaattaaaggttcaccaacgtacttttgttgtaaagtatgagttctcaagtcattagagattcttctcaaaacttgattgcgaagatcatccatgttgttaaattctagatacaaaggttgggttgagaagtgtcctgctttagcaatgctacgagcagtcaaaccttcaataccatccttgattgccatcttgtaggctgtatctaaaattttgtctttactaatttctttttttcttgccattttaatgcacctcaatcattgtataaaacatgtgcttttcaatacacttgttttcttttcttcatcactataatatatccaaaaaaataacaattgcaagtcttatacactaacttattaaaaaatattatcatcgcttaaatagcgatgagccgttgtctcctgtaaattgatcataatgtgaagaagccatttcaataactgcttgcttgtccaatccttgtgcagcacaaaacgaaaagaatgcagcagataaaatatagccgcgttcacgatcatctgtcaggttatctgagaacttcatattaatcgaatgatttgcataatccgttgtcaattcaatcgatttattttctggtttactactcattctattgcaacctcttttttgttctaaaacaaataaaattaaaaattcccggatttaaaattgaagtgcaacactaagtgttaaacaaaaaggccatgaagacctaaacttgaagtgacgaaaaatcaagaaaggaagatcttcatgaccaattcaaattctagcatttctaagcactatcatcaattaaccagcgtacaacgtggacaaattcaagcaatgctggattccggcataacttcccgtactgttatcgctcaagaagttggctgccataagtcgacaatcagtcgcgaaatcaaacgcggaagcgtcctgcaaagagacagcagctatttattgtatgagcactattacgctgatactgcacagatttattatgagaagcgtcgcaaaaactgctatcagcgcaatccattgaagcattatgctgtctttttgagaatgctctccagacgctttaaagctaaatttgatgccaccagcatcgatgagttcgttggtgaattcaaaaggactatgccaggctacccttgtcccagcacaccaaccgtctatcgctatattgatcagggcttgctggacataagcaatattgatctgcctatgaagctcaaaagacgcaggaacaagcgtcatcacagccatggcggtcacgctttgcacaagaagcatcttggcaattccattgaacagcgtcctaaagagattgaagacagaaaagctccgctgcactgggaaggagatctggttaaaggcgtcagacgcaagaatcagcctgctttaatgactttgactgaaagaaccacacgctttgaagtagttatcaagattcctgactatcgggcaagcacatgccaaaggctgcttcaaaaggagattgacagacatcctgcctggtttaaatcaatcacgtttgacaatggctctgagtttgcggatatgaccaagatcaagggctgccagatttactttgctcacccatattctccatgggaaaggggcaccaatgagaactgcaatggtcttttgcgtcaattcttccctaagggcaagagcatgaaagacaagtcaaaagcttatgttcaacaggcaactgatgccattaaccacaaatatcgccgaatcctccaatatcacacagcagaggaactcttcaagcaatatatctcttcataacctaactgttgcacttaatttgacaattcaggaaaattaaaaatttaaaaatttctattataattatattacaaaatcaaaagaattagaaagcgcgtttttatcaatgaaagtttcaacttggcgctcatcatgcacctcaattttaatcgggaaaaaggcctctctttctggcagtatcatcatcggtcgtaatgaagatgctaagactgcttggcctaagcatttagcctttaatccacatcgagataatgtacagaaaaaccattttaaatccaaagacaataagtttgaaatggatttaccaacagctagctactcttattcttcaaccccagaatggacagataagtacggagtgttcgaagaagacggaattaatgaatatcatgtagcaatgagcgccaccgaaagtgcctacgcaaatgaccgagttttagctgttgacccctttgatactgacaaaggaatcttagaagaagcaatggtcaccgtagttttaccttatgttaaatccgcacgtgaaggcgttcagcgcttaggagaaattgtagaaaaatatggtgcagcagaagctgacggaattctctttggcgatcgtgatgaagcctggtacatggaaatcggttctggccatcattgggttgcacaacgaatcccagatgattcctacgctattgtcgccaatcaactagctattcaagaaattgattttgccagtgacgacttcatgtattctcaagacctgcaaaaatttgtctacgacaataaactctggcctaaaaatcagccattcatttggcgtgatatttttggcactcatgacgatagtgacttacactacaacacaccacgagtatggagcggtcaacgtctgcttactccatctgtagcacaagaacccgaaagctttaacctgccatttattcgcaagcctgatgcaccaatttctgcgcaagacgctcaacgcgttttaagcgatcactacaacaacaccgcctatgatttaaccaatcagaaaaacagaaataatgccactttcagacctatctctgtggctactactcaggaatcacacttgcttgagttaaacggtgaaaacatgattcactggctagctatgggtgtggctgcgcaaagtgtttatgtgccattctatcctcaaggcactaaggtaccaaatacctggaaaaatggaaaagaaacctactcaccaaattcagcttactgggtctttaaactggctagcgtcctggttgatcgtaattggggtaagtacggcaccgctttaagcaatacgcaaagtactactaacgaaaaattgcttcaaattagacagcaatatgatcaaaaattagcacaagaaaaggatcaagaacaacaaattaaattagtggatgaagccaatgccaaattagctaaaactgctactgatgcttataaagaattgatcgctaaactaatcaccgaacaaactggtgactcaccgttgcgtttccaaatggatcctaacttataaacaaaaatgcctcaatgaggcattttttcttactattttttcttagtcattaagccgtccatcatttcataaatatggtcggcgtatttttctagccgcggatcatgcgttactagaataacggccttgtcacgctttttcgctaaatctttaaacaattgtcctacttcttccacattttgcgtatctagcgaagcagtcggctcatcggctaacaaaatatctgggttagcatataaggccgtcgcgattgctactcgctgctgttgcccaccagataattcatttggatacttattaaccagcttttcaatccctagctgcttgagtaagccttgcaatttatcttgcgacaaattattttgcttttttactttatcaatcaaagtaaattgctctttaactgtcaaaaatggaactaaattataagcttgtaaaacaaagccaattttattcaagcgtagttctccactttgcttagcagaaaaattactaatgtctcgaccattaatcaaaatttcacctgaagttggtttttgcaaggacccggcgatcgtcaaaaatgtacttttaccggcgcctgaaggccccataattaaaaccacttcacccttattagcctgaaaattgatatctttcaaagctgcaactttagcttcgcctttaccataaactttattaacatcttttaattcaattactgccattttactcaccaattgcctttgctggatcaaccttcaaaattgatctaatcggaatcaaactaccaataatacccatgactagcatccctaacgtaccactaatcataattgctggcgtaaaagtcattggcacagctgctggtaaagttaaatcagttaaccacatcaagataatcgcaattacaacaccaatagctactaaaattatggattgactgatcgttgcaccaactaaagttttacttggaattccttgagcccgcataacggcaaaattatgcattttttgcatagttaaaatatataggaaaacagcaatcacgatcaaagaaataacaaataagaatccaatcatcaattcaaaagttaagttttgagccgtatatcctggaagcttattaataaaggcttgaattgggtatgtcttggcatccttataattgaatttataattgctattctttgaaacaactgcagaagcggctacattaggagcgaccatccgcagttttttccaagttttcattgagccataaacaattggcgcaatattaatcttggcgttatttacaaaaccaacaattttatattttttcttagagccattcagagaaatttgatctccaagcttgtagcctttgtctttgaaactactgtctactgtaatctgattaccattctttgcttttttcccagcaattatatcttgatcttgataaataaactggtcttttttgatgcctaagaattgagctgaaattgagttttttccctttttcttaactacaattcctaattgaccaataattgcttcattcttgccaatttttgcgttttttaaatcgtcttttgtcagaattgactgactcatgctgatattggcatttttatttaaaacaatcttttgcgcattccaattttcaattgcttgtgtattctgacttgctaacccaacagccaaagatgacaacataaaaattaagtagctgatcaaaaagatcatcaaaataatcaagccatagcgcaatttttcatgcttaatttctttcagtgctagaaacataactacatcccctttgctagtatgtccaggctcttcttatagcgcgccaagttcttttcctgattttcgggatctgataagcataagttgataacttcatgactaagtaccatggcactccacaattgtggccccatattcaacaattgtcttgaataaattttgaaattatgtggtatcaagtactcattttgcgacatatgcaatttcatcattggttcatatttactgtattgaactttatcaataaacttaactactcttgcataaaaatgattaggatcaaatttttcattaggactcatcccagcatgaatgtcttcaatagcgatgtgatacatataaacatatgcatcaattaaatcatcaaaatatttataaaatgctcctcgagcaatgttggcattcttaacaatatgtgacaccttagcatctgctaacggataagtgctgaattcttctaacaacaccgcttcaatacgtctacgtttagcagacggtaaatttttaaaagtttgcttaaccattttgttttccccttttccaacacaaatgacgacttgtcatcaattacttatatcatagctgattttgacgagttgtcaatacatatacacaaaaaaagaaggcctctgccttccttctctaaactaaaactcgattatagtagtacaacctagcaacaccatcacggacgctaaatttgcttaatgcacaattatttggcgtatctatcttgtccatgtcgccattactcaaataatgagctgccatcattcgaatcaaacgaccatgtgccactactaataccttaccttctggatatttttgatatatttcgtctaaaaagttagcgcaacgtgcttcaaactctccgtagccctcaccatttttggcatatttaacatagtcgcgagtaacttttccccatggatcaacgacatccggatattccttagcaatatcatccatcttcttgccgtcccaatcaccaaaatcaaattccagcaaacgtttgtctaaatttaatttctttttacctttagtaaaaattttcgcagtctctactgctctcttcattggactggaataaacaacatcaaatttattttcatcaaacttagcggcggattttttagcatattcacgaccaaattcattcaagtctgcgtcaacttgtgcgccctgaattcgattatctttattcacgtctgtttgtccatgacgaataaaaactatttccattttttacatcaccttttcttaaaatcatacccttatttaactaatctttccatttctttactgtttttttagcgttttgaaatttaaaaagcttaaaatataaatagataattagaaaggggaaacattatgtcccgcgttacaattgaaagagatggtctcaccttagtaggagaccgcgaagaaccattcggcgaaatctatgacatggctatcctcatgcatggttttaccgctaaccgcaacactgaattattaagacaaattgccgatgatctacgcgacgaaaatgtcgctagcgtccgttttgactttaatggtcatggcgaaagtgacggcaagtttgaagatatgactgtgccaaacgaaatcgctgacggcaaggcaatcttagaatacgttcgcaccgatccacatgtacgtaatattttcttagttggtcattcccaaggcggtgtaattgcatcaatgcttgccggtctttatcctgatgtgattaaaaaagttgtccttttagcaccagctgctcaattaaaagacgatgcacttaaaggtaacacacaaggcgcagtctatgatcctaaccatattcctgatactgttccactagtcggcaataaattaggaatgaaactaggcggattttatctccgaaccgctcaagttttaccgatttacgaggtctctgcccgctttagtggcccagtatcagtcatttatggtactaatgaccaagtagttaaccctaaatatgctaaaaaataccatgatatttatgaaaatagcgaacttcatgccattacggatgtagatcacagattcactggtcaatacaaaaagtcagcatcagatttaactgctcaatttttaaaaccattattttagcgccgagtaaagtcgaactcagtacgaaagacgtaatgatccttagtacttacgtcaggttcaaattgaaattcaaaatcattaaagtcctgcaaatctgtgggattttttatttgcttctcggcaatgtagcgcaccatttcaccacgagccatcttagcgtgaaccccaacggtcttccacttaccattttttagttcctgaaagtcaaccgtaattaattgtcgtccttgactcaaataaggtttaaccaaacgtgtatattgcttggaagccaaatcgataactatattatcttcttgaaataaattttcagcgatatcactgccccagaaataatacaagctataatcacgaaaaccaaccattttagtatttaattctaggcgatatgggcaaacaccatcaaaaggccggagcataccataaaatcctgatagaatccgcaaattcttttgaatatagtcaagtgcaggttgtgtaaataaatccggagccatatattggtattgaattcctgaaaaagccaaaattgcaggggttaatcgttcatccaaattcatattttctagttgcaatatgctttgcttagtcacattttcactagcatgccaaaggtcttttaactgttcatttgaccttgacttaagaaatctttctagaattcgtgtcttatccaagaactgcggttttgactgaattggaaatgaatcacgatcaattttcataatttttgcaggtgcaataataattttcatttttagattttgttcctttacggtaaacttaaattgtgattaataagtcatgtggtaataagtcaaatgaaaggcgatgatatttgttctttttgatcataaatttgagtatatgaaactaagccttggtaaaggttgattttttaaatgttaaacttttgtttacttttaaatttagaccaatttttgaaattaagacctcggtgtcctgtacagtttgtcatctttgagcaatttaaagataactcgtactaattttcttgcagttaatgtgcaagcacgtttatgcggcgagtagacagcttcatcatacttcttttggtaatattttttgaaaacaggatcatgtaatcttgctagattggcagcttcaatcaagtaatatcttagatatctgtttccagtcctggccattggagtatgttcgttgctgtgatctcccgattgatattgattccaggttaggccggcatacttagccagctgttcttctttatcaaagcgatcgatacttccgatctcagcgataataccagctgtataggttttgccaataccgggaattgattccagaattttgctttctggtaatgcatcaacgatacgatcaattgctttttctagatctttaatagattcattaaagctttggatcatgttgtaatgaacagaaagcactgcatcaattgaatcagtcattactttgcctaagcgatatgaacctctaacagctttcttaattgctttagccaaggtatctggatcggaaaagcgtcctctgcctttaacctgtaagtaagaaattaagtcttcggtaggcatatccgcgatctcatccagagttttactatcggttacaatagacatcattgtagcaccgaaaagaggagtattaatcttatctttatcgacagtgattagtttattaacccgataatataaagcttcaatgaagtgctgtttggtacgagtcagttcttgaactaattcatatctggtacgcgttaaacgctctaaagcaagatagttgtcttgtctggcaatgcttactcgataatgtccaaagcttagatacaaagcaatgtaataagcatcgagaggatcagttttactttcttcaaagactttatgaaacctgctggtttctttggggttaattacatcagtctctacattgagcttttgtaaatcttcgtcattttggaaaaagtaagcaggatgaaaactgtaaatagatgtagcttccatgccaataatgatttgatcatagtgtttattttgagctagatctaaaatttgttttttcagttcactagcaccataaagatcattgacaaagctatcgttaattaagcgtttgttttgatcttctgaatcaagtgcaacgacctgtaaatctttagaactaacatcaataccgacaaataatttcattggaaatggcctcctttctttcaaatttctgatcatagattttgatcttcacatgttaacccctaattacagttcttaagttcaatctcgccagtataagtattcactggttgcttctttgaaagctgcacctaatcccaattgctcaaggactagcaaaaagaagcaatcaatacagcatgtgagttagagcataaaggaactgcctgggtggcagacttataaagcagacaaaactgcaggaggtgataacctagaccagttgaccaaagccaatgacaattagaggctaacatgtgaagatcaaaaagcaaatactaatttgattaattatcacaatatgactaattacaatttatataatacgaggaggaaaaataatgaatcctgattttgcaattgtcttaaattatcaacttaatgataaggctgatgccgactttttagtaaaaacagcccgtaatatcggtgctcgtgcagtgatgactgacaggcaaactgaagatttcaaaacagcttgcgctaagtatactatttttttagctaatccagaaaatagtactgacttaactaaggataacgtcattgataccatggtcaataaccgtaaagctggtaagactacaattattaatgtgcccgttgaagcaggcaagttttctgccgcaactcaagcaatgctggatacgatcaatgattggatgcaccaattcggtcacgccttcaacgaaggaaaaactagtgctttaaccagtagcgatggctttattttagaaaatcgccacgcaaattaccaaaaatatgtcttcttacctagtcctcttcctgacaaaatcgtggtagaaggcctagtcgaagaacctaaccgggtagaatggattgaacatcgaactgatcttgattttaactataaggatcaaaaattaactattaacttagtcaaaccagatgatgagtttgcttggcaagtgttgcgaattcaagcccaccgacctgaagatgacattttagaaacgaaattttagtaaaaaggcgttctttgtagcagaacgcctttttacaaccttatgtaattgctatttctattttcaaaaaaatttattcttgcttaagctttaactactgaaccattatcaaaaaattctctaaaacgacgtgcttctttatccagagtaatttcatcattaacttgcgataacttatagccaacaaaataaggtggcgcttcaaaacgtgtaatatatttagcacaaataccgtcatcattacgcggataaaagaatagattataagaatcgcagcggccattatacatgatatttaacaaatacttggcaccactttgaatccagtcagcccacaagtcaatgctatttttatctaacaagttaatattgagctcagtgtagccttgaacggggtgttcagcaatgttaacttctaccccacttttttcaaaaagggtctcaccttcaaaattattcgggtgaatatatttatagccatcttcatgttcaaagccaactatctgcatatgcgggtgaatcaaggaaccacctgaatgtggaccatagttcttgtaccaaacaattgactcatattggtcactagcctgcactttttcaaaacaagctagcgcaaaatgcatcaacttgcgattatgttcctgcgtataagtactaatatcgccgttatgatcactagattcaattagtacagtctgccaggtatcgcgcaaggtcgggaacttattcttaagccaaatcatgtcatcttccttggcgtaaatatcagttaaattttcaacatcacaaaatgggcaaacgtttttcttcttatccttacgataagattgcggtttgcctttagcaatgctcatttgaaaaacaagtggatcattagtcatatttattcctttttttatttaaaatagtttaaaatctaatgggtaaagttttactataatgtaaaatattttgtagctttactagcataaaaatacttgttatactttgttaaagcaaacgtttattcgaaatttatcaagagacgggttttaataatgcaatctagaacagaaatgagaaagcgaaacaatcgcaacaatctctatcttattattattggcataattgtcgtaattgcaattatttgtggctttgtcattcataatcaaagggtagctgctgaacgtagccagcgtgaatatgcttctacccacttcaaccctaatgtaacaatttatggtgtgcaagtaggcaagcttactgttaacaaggcgactgctaagatcaataaacaagctgataatgtcgtctttttaagaaataaaaagattattgctgaaaaagacgacaaggttcaaactatcagccaagctgaagttaaaaatattttcactaagcagcatactgatttgccaagcaaacaaaaatacgttttcaaatccgccaaaatagatgaagcaaaaaagagtttgcaaaaaatacaaaatgctgtagtcacctataagatcaatggccaggaattcaagctaaaagctgatgacctaattcacgaagttacttacaaaggtggtaaatataaattcaccgatgtaaaaaaactgcatgctaaaatggaagcgatcgatcaagaagtcaaaactctaaagaagagttataaatttactgttcctactggtaacaaagtcaatggcaaaacgattacggtaaaaaacgaaagctatggttggggaatttatgtcaagaaggctgtggctgcagtagaaaatgcttttattaatggtcaagatgttgttggtggtagtaagtatatttatggcgagggttatagtacctatgctcatggttatggcaagagcaatcatggtattggtaaaaactacgtcgttgtctccatcaaaaatcaggaactatgggttgtccgtaaagggaaagttgccgttcacttaactgacgttgtcacaggtactgaaaataagagtaacgctactcctaaaggtgtttggtatatcatgtacaaagaatcacctagcgtattgcgtggttataacgacgatggctctaagtatgcctccaaagtacaatattggatgccatttactttgagcggctgtggcttacatgacgctagctggcgtagcgattggagtaagtcagcctatcttactggtggctcacatggctgtgttaacattcgtccagctgaaattagaagtgtttggaacaacgttttaactaacgatgctgttatcgtatattaaaaaataaagattaatcgcctacttcaattgaagcgggcgatttttttgcgtaaaattaacagaaaagatatagatttttgaaaggatcaaatatgttagtcatcggtattatttgcttggtggttgctgccatttcttactttaaataccttagtgaaaagaacggacaagctaaccaaaaacaagctgaaaacaaaaatgaggcaaaatggcagcgcactttagcaatcattttcctcgttttcggaattttattaatcggttattggattgcattacgctaaaaaagacgtgaattttcacgccttttttaaatataattgattaccacattacccatattagctcttccctttaaaactaaggtaggaccgccgccattgctttttcctttaactattacattaccaaggctaatgcttaattgattatcaatctgccatgataagggaacgtagagatttacatttcccattgaagcagttagattaagcacgactgtatcacctgctgctttagcatcatcaagatagatattggcattaccgaatgaagtttcaagattaattgactgtaaattttgtgaatgaatataacgtgaagaatcgccagccatcttttgattaattacgatattgtcaccatcttcaatcacatcttgaacatgatgatgtgttacttttgtctctgtatcagcatcgtcactatcatcgtcatcattccaatgaaaactcttcttgataacaatttccggatcttttttaaaaagcaagctcaatcccattgaaacaagcaaagcaataaacaaaatcatccaagaggataagaactttttaatgcccaggggacctgcataagtaattactaaaaaagcaattgagaaaacggacaccacaatgctcttatcaagcaagcccttaattaagcaagccacaaaaatgactgtcaaaataattgtccaaacgctaattttgaagcttaataagcctaattgactgatcaccaaaagcgcagctgcagcgattagtcctactccccacaaaattcttgcaaaactgtttttcattataaagaccttctttcatctaagcatgtgcgtaattctttgtagtatcgacgggatgcatatacagttttataagtatcatgaaactgtatcttgcaatctgaaatcgaccgagttaaaccataaatttgatctaaattaataattgtcgatttggaaatccgcatgaaacctgcgcccaaaatattttctaactcatacaatttatgtttaaccaagtatgccttatcttgtgtatgcaaaattacctgcttggcatctgtttcaaaaaacaaaatctcgttcagtggtaagtagtaagaaacattgtttctaaaacattcaatctgatcattgtgttcaataccttgtaatttcttataaagctgctctatttccggagaaatatttttagctttaataatcagttcatcttctacggcatctggatcaatctcaagttttactttcatgtttctcactcccttctgaatctgatatttatattaaaaaatatttcagatagcttttccatagttttgaactaagtggtaaattttggcttctaagtggcaaaaaaaataagacgacctctgtcgtcttattgcttattatcaatgtaaactagtaaaaaatgttatcagtccaaaaataattcctggaaaattagccgtgaatagcggccaatctttcttttcaccaagaattgcataaagtacccagatcgtgcaattaattgcagcaaccaacggctgaaccggattaccataatttccgttcaaattattaataatttgcggaatatatgaaacatacatcagtacagataataccgacccaatacgtccaatagttaaaacagtttttcggtctaatcctttgaattttttcaacaaatcgctcctttgtgcttcattataagaaaagctagagtcgattgcaaaaatcatactttagtggacaccttccattagcacattaattctcttaactaaaaagaacattattaccgcaaaggctacactgaccaaaccaacagccatgaaatattgtacttcagtgccagttgaatagaacttaacaatttgtgcattcactgcttgtccagttgcatcagccatgaaccacatactcatcatttgcgaacgatatgcattaggggccagcttggtcgtaattgataaaccaattggtgaaatcaacatttcagcaatttcaactaagaaccatgaaccaactagccaaaatggactaaccttgcctgctgtaccataaagcatccctggcaaagccatccacatataagatagaccagcaaaaactagccctgctgcaaacttgcctggagctgttggctgctttttccaatgttcccaaagccaaacgaagattggcgttaaaatcataatgaataatgggttaagagactgaaagttggctgctgtaaagtgccaattaccaatatgaagcacggttctttgagcggcaaacagagctaaaactactgagcctgattcttcaatgccccagaagatagctgcagcaaagaacaatggaatgtaagccttaactcgtgaacgctcaaccttagttacttttgaactacgtagcatcatcacaaagtaataaattggcagtgcaattgctaaaatagtcaataaagtaatgacattgtcaacgttcaattgaccaaagccggccattgcagctaatacaagggcaatcaccacgaacccaataactacccacttaataatattaagcaagtcacctctatcaataggatcattaggcgtcaaactttcaggagaaaggtattttttaccgccccaaacatattgcactaagccaaagaacatcccgattgcagctaaagaaaagccggcatggaagttcatttcattaccaaaaatatgaaagccaaaaccttgtgctgcccatggaactaaccaaggtgcaagaaatgatcctaagttaatcccaaagacaaagatgctaaaacccgcatctcttctgcgatcttcaactgaataaagaccaccaaccatgtcagatacatttggctttaataaaccagtaccaaccacaattaaggcaattgaagcatataacgccgttacaccggctggaagtgccaagacaatgtgacctaacatgatcaaaacgccgccataaaagacggtttttcttgaaccccaaacacggtcagacagccagccaccaactagggttgataaataaacaagtgaaccatagattgacatgattgatgcagccgttgtttggtccattcccagaccacctttggtgactgcataatacatgtagaaaagcaggatggcgcgcattccgtagtaactgaagcgctcccacatctcagtaaagaataacgtggacaaaccctttggttgtccgaaaaatgctgtatttgaatcttgtttccccaaataaaaactcccttcttatcatagataagcacaatagaaataattataccacgaaaaaataaggatccactttttacagtgaatccttatttattaggtaattattgcttcaaattaattgattgccttagcaactgcgttgttaacagccactttttcagcttcgatcaagtcaactttaccttcaataactttaatatccatcttaatttcacgactaagaagtggaatatttacctttggttcaaagaattctttaaattctttaagtctagttggagtatggaagacgcgagtagttactgtgatgaatgttgtaaattccatgtcaccaccgacagtcttatcaagccaatcccaatcttctctaatccagtcccaggctgcttgttgaccatgatggttgctgagcaaaccagcataccagccacgcaagtcttgtggtttaattacgtcagcattttcaaaattatcaacaattaacgcaacttcggccggatcaatcgtactagtaattgcgctacgaagatcaactttgtatgaaggatcagcagttctttgatattccttgattaggttttcgattaggttgtggctaccaaagttctttacttcattgattaaaacatacggacgaacatcagcattcattgcctctaagttgtcttcattagcagtgaaaatctcatgagctgttttaattgagtctttattttcagcgtaaagactggcacttaattcatatggacgaatttgtgcatcttcatcgctttcacctggcttaactttccagcccaaacgagcaacttgaccagcggataacttgtcataaagcttctttaagtccttttcttgagctgattcaggttcaacaaattggcgcaacttagcagcagtagcgtaaagagcattaataactacacttgacttcgagtcagcaaatttagtcaaaagtggcacaacagcagcataagaaatttgtttaccttctgctaaaagacgtaagtcttgcaataattgcaatttggcaattggatcaagttcatcaacatgagccaaaatatcatcaagcaaagtcttgtcatacttaacgataaagtgcgagttgttacctacattaattctaagtgggtgacctgcttcactacgtaaattcttgtagtaacctaagtcgatttccttatcagacataatcttaggtgccttgaagttagcattcaacggaatttgccattgtctaccaacgtctttaccttcaccaacgaagaattgttgttgtgaaagctttaagtgaccatcgctactatcaacatatgcactaactactggataacctggttgctttaaccatgagtgcataatcttgccaatatcaaggtcagttgcggttgaaagagcatcccaaagatcgtcaccagtggcattaccgaacttgtggtggtcgaagtaatacttcaagccttttcttaaggcatcgtcaccaagaagtgaacgaaccataactaacattctagaacccttggcataaacaatggcactgtcgaaggcagagtcaatatctgctgggtcattgatttccatttgaattggttgaacaccgtcagtagcatctctagtcaaagctgcaggtgcttcactggtttggaacatttcccaaatatgccaatcaggttctagaccatcaactgccaagtattccatcatgttagcaaaactttcgttaagccataaattatcccaccatttcatggttactaaatcaccgaaccattggtgagccaattcgtgagtaataactgtagcaaccaatttcttcatttcaaagctagtattgtctggatcaagcagtaaatatgcttcacggtaagttactaacccccagttttccatggcaccagcactgaaatctggcaaagccaattgcaatgattgtggaagtggatacttagtttggtaaaattcttcgtaaaattcaattgcgttcttagcaacacccaaagcaaagtctaattccttaggcttgtgggccttagttgcataaacaccaattaagacgccatccttagtgtgagtagtctttgattgcaaatcaccaaaggcaaaggcaaccaagtaactagacatgcgaacagtttcttcaaagtggtggtagccgtccttgtccacttcaacctcaggcatattggcaagagcaacttcgccatcttcttcatcccacttaagcgcaagactaaaagtagccttagcttctggttcatcaacacatggaaaagcttgacgagcaaaagtagtttcaaattgggtaccaataatttgcttcttcttaccttctaactcgtagtatgaaggataaatacccatcatagtatcagtaagtggtgcactataagcaatttcaattacagccttgctgtttacaccagttgaaattttgatagcttcctctttttcaagtacttcaaaatctacctttttaccatcaaccttaacgctgtcaatggtcatatatttttggttaataaatactggattttcaattacttcaccggtaatcgttgaagtaccattaatttctttttgtttacggtttacgttaatgcgcaaatcatagtgttctggatggaaagtttcataaaaacgtttaactgtcattttttacctcctattaacagctcatttacttttaattctaccaaaataaagaaaaaagcgctcaaaaaaggctatttcttattgattgtaaggatgacgtttcagttctgtaacattgctgtcatattgagcttgtactatagaagcatagtcattaagaaataaataagttttgaaagaattaattaaatttaataaggaatgaatacatcaatgaataaacatgttaaatctactttagtaaaaatcttagctgccttagcacttgcctttgcttgtgttgcagttgcaaatgctttttctaccaatacttcaactactcaaactgttcaagctgcaagaaagctttcaaaagctgaaaaagctgctaagagatggatcgcaatgcgcgaatcaggtggtagctacactgctagaaacggtgtttgttacggcaaataccaattaaacattggctacttacatggtaacctttcacctaagaaccaagaacgtgttgctgataattacgtttacggtcgttacggttcatgggttaacgccaagagattttggttagctcacaactggtactaaaattaaattcctttaattcccaaaagctaaagaaaaccagcttagtccaattgactaaactggtttttgttttactcaaaattatcttgcttgataaaacgataaagtgcaatgactaaaactaagatcgagcacgccattcctacataggccattgttccaatgtggacagcattgtcagcagcttcacgggctacttgattttccattgcatagcccacaacccatttacgcattaataccggcgtcaagacaaaactaactgtactaataattgaagtcactaacgctacattacgcgaatatggttctttaaagaactgtgctaatacgcagaatgctggagcaatcatcaatagcaagatccacataataatccagcgcccagaacttgaattcatcatctgcgcactattagtggcataacgatatgagctccaaagcgatccaccagataaggtattaagcaaactcaagaaataagatccacgttgtccataaacaccaccattattggacagaataccttgaacaagttggaaactatcagttgatccagccgatgaaaaatcgaccgacacaacttgcttcatataagtagctaaaaacatggtaactgagccacctaattctagtgctcttaacatgcttaattttcttgaagctttcagatgaaattccagacttaaaactcgatcaggatggtgactgtgaccaatgataaaaatccctgcaatgacgatcaaggctaagataaccaatccccaccagaatttaatcatggcgaaaaataaggctaaaacaataatcgcaaccgaaatatatggtcggtcagaaaaaatattccaaaagttcaacttaacatgatggtaatttttccttgatgcatttgcgacattttgattaataatcggctgaggattactaatttttctgctgcgaaattcttcacgtgttgttgctcttgtcttagtataatcggtccgtgaacgatctgcgccggcttggccgtgctcttttttcatgcgatattcacgccgcgacatatgtgccataaactgcagcccccttctcaaagcactatagtagcacattatcacttttttgcttgaattaagaatgaaatttcaaagaaaatttagctttgttttgcatgtgctaaaatgaatattaataattgtgctttttttagaaagagataactttttgaataaaactaaatcagcaaaactgccagctggttggcatatggccttttataccttatggctcggttgctttatcactgggatgggctattcaatgacagtgccctttatttcactatttatttcagatttgggtaattattctaaactgcaaatcaatctttattcaggattagcttttgcaatgacttttattgcccaggcaatagtttcaccatattggggcagcctcgctgaccgcaaaggtagaaaactaatgtgtatgcgtgcttctggtgtgatggctttaactattaccctaactggatttgcacccaatgcaatttatattattgtaatgcgttttattcaaggttctttttctggttatattaacaacgccaccgctttaatggcaagtgaaacgccgcatgaacgtagcggctgggtcatgagtcaaatgatgacggccgggactgccggaaatttggttggaccgctattaggtggtgctctctccagcttctttggcaatatgtttggtggcgcctgggggtatcggattccattcttcattaccggtgttttaatgttcatcgtctttttaggtacaacgttcttagttcacgaagactttactccaatttctcgtgaaaagatgaagccgatgggcgaaatcatgaaaagtttgcctagcgtgaaattgattgtggtgatgtttattactaccatgttggtacaatcatcaaccatgtcaattgatccaattgtttcattatacgtaaaatcaatgatgcctcatggcggggatgttgcctttgttgcaggtgttgttgcggcaacgcctggtcttggaacgctaattgcggcatcgcgaattggacacaagatggatgaagttggaccgttacgcgtattgcgaatcggcttagtcgtcggtgcccattgtttgtaccaatggctttgactaattcgccttgggtactagcaggactgcgcttcttattagggattgctagtgcagggatgttgccagccgcacagacggtattaactttaaacacaccaagcgaaagtttcggtcgaatctttagttataaccagtcatttcaagcagttggtgccgtgttaggatcgttaatgggatcgactatttccggtttttcaaattatgcaacggtattctggctaactggatttacgttactgatcaactttgtgcttgttttgatttttgcttggggaatttcttatcggaatagataggttaagcatattcctaaagtatggaatttaaaaatgtaataaaagagctgtaaatatcacaaaaaatatttacccggatttaaaattgaagtgcaacactaagtgttaaacaaaaaggccatgaagacctaaacttgaagtgacgaaaaatcaagaaaggaagatcttcatgaccaattcaaattctagcatttctaagcactatcatcaattaaccagcgtacaacgtaagtgtcaatgtttttgcggtagcctttaaaccattagtctaaccttaatttcttaaatatttatatgacttaaatttctgcttagcttgcttaaataactattgccagctacctgtgcggttaatgcgccatgctggatgcctaaatgaacttcatgacgcttctttaagctgtcacgggccgctgcttttaattcctgttcagtcaatacagttatttctgaatcttcaaactcgctgctaagccaaaattccagctctcgattcttgatgcagcttaagatcctaagcatgccttctgctccagattttgaccatttcttgccttgccccttaacacggtaggtatacttgcggtggttgctctcgcagcagccaatggctttagtcacagtcagttttcgtttcttaaacggcttaatatcgtcccaatgacgatcaatataattccttaggcgccccagataatcatgattgagctcggtattcaattcatcaattagtcggctttctgcagtggttaggatagttttaactttgtcatagctgtatttgtattccaaagcagaaatcagcttgccttgcaggtcaggcgcaaaatatagcctttctttgattttcttatttaggtgaaagacatccaagaaatgctcatgacgcttgcatagccctacaatgtcatcgaagtctgttttggcatatccagcaccgccatcggcgttgctaagaattacagtatcagaaagatcataagtattggccaggtactccttggcttcgttcagcgcatcaagtcggcttaaagaaacaaattccttggcattgattcgctttctgcgtttcttgcttatattgacaatgccttcacagacctgatagcgatgaaattccaaccggcttttagtgcctttgatcaccacgccatcgccttcaagatacaaaactgggacctttttcttagtgcctgcggcatcatatcttgaatctgcttcttggcccgctttaatatttttcccggccatttttaccaaattgcccacctgcatatggctaatattaaagccagacaggcaattgactgctagagcagtattgcgataagtggcaacgctgcttacttctaagatgtttttgactgctaaaatactgtagcgcttgtatttgtcaaagcccattaattcatccaagggataccttgcttgtttgcctgggcagacatatcttcttctgacatacctaacttcgccaaaagccatattgattgagcgctcattcttcttatcaatctgatagccctgtgctttaaccttggtaatcatttcatcatcaactttagctaaagccaaggccatgatttccttaatcaggtttaagaagaaacagattatttttctttcacgcttaatataattatcttcagactttataatatttgcgatttcagttacaattgaattcataaaagaccagcttctaatgtgttttttgttcttaacatcagactactggtctttttgtttgagctcaagtccaaattcaaaggacttgggcttttttaattatttattcaacttaccgtaaaaaattatacacttaggcgtacaacgtggacaaattcaagcaatgctggattccggcataacttcccgtactgttatcgctcaagaagttggctgccataagtcgacaatcagtcgcgaaatcaaatgcggaagcgtcctgcaaagagacagcagctatttattgtatgagcactattacgctgatactgcacagatttattatgagaagcgtcgcaaaaactgctatcagcgcaatccattgaagcattatgctgtctttttgagaatgctctccagacgctttaaagctaaatttgatgccaccagcatcgatgagttcgttggtgaattcaaaaggactatgccaggctacccttgtcccagcacaccaaccgtctatcgctatattgatcagggcttgctggacataagcaatattgatctgcctatgaagctcaaaagacgcaggaacaagcgtcatcacagccatggcggtcacgctttgcacaagaagcatcttggcaattccattgaacagcgtcctaaggaggttgaagacagaaaagctccgctgcactgggaaggagatctggttaaaggcgtcagacgcaagaatcagcctgctttaatgactttgactgaaagaaccacacgctttgaagtagttatcaagattcctgactatcgggcaagcacatgccaaaggctgcttcaaaaggagattgacagacatcctgcctggtttaaatcaatcacgtttgacaatggctctgagtttgcggatatgaccaagatcaagggctgccagatttactttgctcacccatattctccatgggaaaggggcaccaatgagaactgcaatggtcttttgcgtcaattcttccctaagggcaagagcatgaaagacaagtcaaaagcttatgttcaacaggcaactgatgccattaaccacaaatatcgccgaatcctccaatatcacacagcagaggaactcttcaagcaatatatctcttcataacctaactgttgcacttaatttgacaattcaggcaaaaaatatttacagctctttattattttcaattttttacgctaccatcttttcataaatgcgatacatccgattatcataagcgcacattgaaataaccagattatagcccgcgttttctttctgccacttttcaattgcgtcaactgcgatcttagttgcatcttctgcaggatagccatacacacccgtagaaatagctgaaaaaattacgctatgcaatcccgctttctttgccaaagccagtgaattatagtagcaagaagctagcatatgtgcatcactagtcttgccagcataaactgggcctactgtatgaattacatatttcgcaggtaaattatagccatgtgttatccttgcttcacctgttggacaaccatgcaaagtcatgcattcctcaagtaaccgtggaccagctgctctatgaatggcaccatcaacgccgccaccaccaagtaatgaattattagctgcattaacgatcgcgtcggctttcatcttagtaatatcgcctttaataatttttatgtctttcataattatgtccttagaaataaccaacatttctttctaccaccattctaacaccaacaacatcagttaggctcagaaagaatacaaagcatattgttatttttatattacgaacttgaattgatttctatctttagtatcctaatattaattttagcgttataggagcaacgaaatgaaaattttacgacgcagtttatgcatcatttcgatcaccttattttcttttgctttgagcattctcattcctagtgttcaagctagcaaaatagttttagatgatctcatcatatttttatatttaattggaatcgtaattctgggcattctgttgttgtctaacaaatttgattacctatcactcagtctaagcataatcttgctactcgcaactatcattgcttggatcagattcccaatgattagcattatttatactttttttatagcttatctgagtatatgcttactaacaatttttattgctaaaaggattaagaaataagtcactatgttttctaagaaagaactaaaaatcatcaataacgcattaattattatctatttgctttcagtcggcccaacattcagagactgtaaaatattttgtgtaaggatgaataattccttaaatttatttcttaaaacattagaaaaaggagttcctttctcgtatgattggtttgaacaaaaaaacacatacagaaagaagaactccttcatgaatgattttacaaaaaatatagcacaagctctattcaatcaagacaaaataaacgatttattgcgcaaagagctacaacaggctgttaataacttgctagaagctgaattgactgcctttctgggctatgatccctatgccagaaatggctggaatactggcaattctagaaatggtgcttatttccgcaaggttgatacgcagtttggaccaattgaagtgcaagtgcctcgagatcgcaacggccagtttcatcagcacacgctgcctgactacaagcagcactctgatgttttggaaagcacgattatcaagctctactccaaaggcgtaactaccagagaaatcgctgacttgattgagaaaatgtatggcagtcattatagtccagcccaagtatcaaatatttccaagcagatgctccccaaggttgaggcttatcacaagcgcaagctaagcgacaagtttttctgtgtctatttggatgcgacataccttcctttgcgccgagaaacgtttgagcgtgaagcagtctatattgccattggcattaaacctaatggacataaagaagtcattgactactgcattgcgcctagtgagaacattgaagtctggacagagatgcttcaaaacatgaagtccagaggcttgaagcaagttgagctctttctttctgatggtgttgttggcatgaaagcggccttgaccaggacttatcctaaagctcattttcaacgctgcttggttcatgtcatgcgcaatatctgtgctaaagtccgggtggatgaccgcgaaaagatcatgaacgaattcaagcagatacatcaacagacaagccaaaaagaagctgcagctgtcttgcatgaattttatgcaaaatggaataaagcttatagccatgttatcaaaggtttgagggaaattgagcccgatctgctggtcttctacaattatcccaaacaaatcagagcttcaatttattcaaccaacatgattgaatcctttaacaacgtcatcaagcgtaaagctaagcctaaggcagaatttccaactgaacagtcgcttgatgtatttattggcatccaggcaatgagctacaatgaccgctatttcaaccgaattcataaaggctttggtcaggttcaggataccttagaatcctattttgattaaataaatgattaaaaaatcaatttacgagaaagaactatttacacaaaagatttgacagtttcaacattcatcttcggttttactaaatcaaatgatttcacaagtactttctttttaattgcaaatatcattttagtttgtttattcattatcattgctatcagaattgctaaaatcaatttcaggctaaagacacaatattatctactaggcttcatcactcttatttcaataatagaactagcctaccctggactgacattaaatgaacgcattagcaattattttgctatcggcaatattattttaggcttgctaactactaaaatctcaaagaaattagtttaaatataggacacaaaatgaaatatctgaaaacaccaagattaattaacagtattttgattactttacgtcatactgctataaattattgaattcttattactttaaaactacatcaggtattttcaatcattcaataaaaaataagactagcactaagccagtcttattttctattaatcaactattcttggggtgagaattgccatactgttccatcttggctacggtatgagccatcactcatctttgtaaatataaagacaacttttttcgtcctaattgtgtaaccgttttttgattcagttgtatcaactcggcccaaatcagccttaacacctgtttggggtggattatttttcttaatagaatatgcttgtaaaatttctttattaagtttagtcttcttttgctcagagttgttactatttttagcaactaaaatagcatgattctttgtaaaatacagatcaaaccaattacttaagcgattttctgtgttgtctactgttaatgttcgattaacccagtttttaggtaccgttgtttgattattgtagaaaaacattccaccaataactgctacaagtactgtaactactgcaattacggataacgtcattttctttttcatgatacgtttcctcttaaattcagcattaattatttggcactaagcctctcgaaatgagtcttacatttcctgaatacatgctaacccatcggtttctatttgttttaaaattgtgatccatccaggtactgtttctatacaaatagccactgtaggcaccatcattataataaactttagaaggtgttgtgttgagtaagttcattccatctcccctaccccaactactgtatctataaacattagatacatatttatgaagcggaccatttttgattggcccatacactttaacactctttgcttctcggactgtagtttctgaagcctgaacattctaactattggtagttaatactggagctacagttacacctacaagagtagcaaccactaataatattgactttttcatttttatttttcctcgtttaattttgatgttagtactactttcttacgaacagaagcaggtgcaggaatgctctttacatcatagctgtacaaatatcttctatataaggtagtagcactcttaccaactttttcacgcataacttttgaaagatatcctctataaccgttatactcaaaatagtgagtggcaccataatcataacttgaacctaaggtgatccaaattctcctaggtttatagtaatctgctcttagttttgaactcacagttgtttgtgtttcagctgatgcgctaacctgattcgaaactgtaaacaaactaacgccaactaatcctactagtgataatgaaactagttttcttgaaattgatttcatttttatacagataaagtaccttcactctctggccaaatcattattatttcctcctttcgtatcttgattatcccatgaaactctaatattacttctaaagttgcgtatcacaaaactactctttccaattagtcaccctatcttcatatcctagagaaataagcatggcttttacttctttagcttttgctatatttccttcatacaaacatttatagaaactcccacatgccttataaaaaagaaaatgattagtattgttcaaattcagtaagtaatctaaacaatttttaacctgatttccttttaagccataattacgccagcaataaaggtaattgatacaaatacttgctatcctatcttcatatttctctgaatatgaaaccttctcattgtaatgtttcaaaagaaaactaatataattatctgcttgttctgtagaaaaaacaggaatacagttatcgaataatcgcagcatatcaatattttctacccagttatcttttgcattaaattcagcaataattgtacttttgaattcgtcacctaactcatccaattgatttcgtacaattgctactgcaacaactactctgtacttaaatattctgctatcagataatttcattacttcttgcaaacattcttcgattttttctttatttgaaccattaaatgcacttttcagtttgttttcaagttttaattcaattaagtcctcttctgataaaaaatcatctttaatttgttccaaaaactgatctacatcaatatgatgggcaaacaagatcttaaatagactttctgcagaaattccttctattcctcgttcaattttagaataatggcttttatgaattattccttgaatcatttcatcttgcgttagtcctaagtgtattctttcttgtttcaaggcttcaccgatagtcatctttcatccctccaatttaacttcaactatactatctttttaattttctctccatacaaaaacgccttgctcaaaagcaaagcgttttttagcataagcaatatttgcattaacccttatcggcacctgcagtaattccgttaacgtagaacttctgcatgaagacgaacaagatggtaatagggatagcgatgattacacaccccgcaacgaattgtgcgaagtatgcggtcgcattacccttagctgtgtggaccatgttgtaaagtccatatgcaaccgtgtaagtcttagcatttcctgaagttgaaagaataatacctgagaaaatgaagtctgtccatggagcgatgaaagcggtcaaggcggtataaacgatcattggctttgaaagtggtaaaccaatgtgtaagaatacttgccacttagtagcaccgtcgatttcggcagcttcgtcgattgaccgaggaatagtatcaaagaatcccttagcaacgtagaagcctaagccggcaccaccaacgtaaaccaataacaacccgaagaggtttaacatgttaagacccttcaagatgtagtacaaagcaatcattgacatgaagcctggaaacatccctaaaaccaatgcaatttgtaagaatggttttctgaatgcaaagcgaagtcgtgataaaacgtaagcaactgaaatagttaagaaagttgaaattaccattgaaagcaatgaaataactaaagtattaatgatccagttaccaaatggatattgtggattagtaaaaataccaatatagttttgcaatgtgaatttttccggccagaaggtcgaaacgaatccagtatcattgaatgaaaaacttgctaagacgatccagacaatcggtaaaatccatagaatcgctaaaacaattaataggatataccgaaagattaatgagagccgtctttgatttgaatatgacttcatgtctagccctccttaaatgcattagtacgacgatatgcaatcagtgaaacagttgcactaataatgaagattaagatacccaatacggcactggcgttataacgctgttcctgaccgaaggtcaagttatataaccacgttaccagcaagtcagtcgatccggcaccattatacttactgttcattggtgcaccacctgtcagcaagaagataacattgaagttgttgatgttaccaataaattgttggataagtgaaggtgccatcacaaataaaatttgtggaaaagtgattgaacggaaaatttgtgcagcattagcaccatcaatcttagcagcttcaatttgatcttgtggcaagttttgaataatcgctgttgaaaccaacatagaaactggaataccgatccacatgttaacaagaataacggtaattcttgcaactaaaggtgaagcttggttatcaataaagtgaattggtgaactaatccaatgcaagttcatcaagatattgttcaaagcaccttggtagtccaagaactgcgccatcatcaaaagtgaaacgaattgtggtacagcccaaatgataacaaagattgttctccagaatcccttgtgcttgattccttttgattcaatcaaaagagcaagcaaaacaccaaagaagaaagtcgtagcagtagctgctacagcccagattaaagtccagcctaagactgggaagaaagtaccagctaagtcaccactcaaaacattgccaaatgcttggaagcctgtccatgagaaagcaattgggtgttgacgatcatagttggtaaaggccattgaaatcatgaagatcgttggcaaaatcgtaaagaacaagatacccaataatggaataaccatcaaggttgcgtgtaaccgagtatcaagcaaactcttaagttcttcaacgttagttggaatatggtccccatcacgcttcaaaatataattatgtctagttgagcgtaagttgacaatgtatagataaatgattgctacacataagatcaaggccaatacaccgaataacaaaatcaaaactgagtttgatggttgcttggttacataaacgccttgtgcggcatcataaacaacttttttggttttaatagtacctaatgtagctaatgaatttaaagtagggataccactgaggataaaccaaacaataaagataatttctgaaagtaagagtgaaataccttttacccattgtttgtttgccaaggcgttactacccattaagaagaatgataacttggtagcaatgtcaccttttgaccaaacctcgcgatatgttgctttaggagctacatgctttttctttagaaacataacttctccccttcttaggcaaaaaggctggacaatttttatttagcccaacccttgcttatgcttttagcaaattatttcttttcaatgttcttagcgagcttagcaagttgtggcttgtattgtgctggcttaatcttgccgtcgtaagtaccactgataagcggagctgcaccattccagaatgcggccatttgtggaagcttaggttgcaatactgagttacctggcttagccatttcgattacagcttcagcaaccgggtcactcttaacagcacttgagttgacagcgctcttcaatactggaatttgaccagcgttcttatgagcaattaattgtgacttcttgttagtaatgtaagcagctaaatctgaagcagccttagcattcttggtgttagcattaactgcgaagccttcaataccaaggaatgcttccatttgtacgctcttaccaccaacttcaatcttaggatacttagcaactgcgaagttcttacccaagatcttcttgatattagcagcgttccaaggaccgtccaaaatagcttgtgcgttacccttcttcaattggttcaaagcgtttgaagtttgcattacgcccttgttcttcttttgagctgcgtaccacttcaaagcattaataccgttttgtgagttgaaagttgagcccttaaggtcttcaccattcttaccgtaaagtgtagtacctgctgagaacattactggccacattacgtaagcgttagtaaagtcggtagctacaacaccctttgaagttaaagtcttccagtccttaacgtcgttagctgataacttagacttgttgtagtaaatggtttgagcttgttgtgcgtatgggaatgcgtaaaccttgcccttccaagttacaccctttgaagcaacatcgacatagttgtcttggatatccttagttgctgatggtgaaagtgggttaatgtaaccagcttcagccatttgacctaattgatcgttaggaacttcaaagacatcagcagcctttgatgggtccttaccaacgtctgtcttagcgttagctgaaccgttaggactttgaactacacgaaccttaatattcttgttcttcttagtaaagtccttagcaatttgcttgtagtaaggaacttgttcagtatccacccaaagagtcaagttagccttcttgtttgaattactgctacttgatgatgaattacttgagccgtttgaacatgctgctaatgataatgcagcaagaacagcagtactacctaaagccattttcttccaaatcttcatgactttttcctcctaaaaaatcaaaacaataaacaattcttaacaacagtagcttctgctacatatggttgtaagcttaattaataattatctgtactgcgttttcagtaccagattagttaacaatcgccttggtggaatctttatcaaagaagtgagctttgttaacatccaagcccatcttaaccttgtcacctggcttgtgataatcacgtgaatttacaatagcagtaaattcagtaccatcaacttcttggtgaagctgaatagttgcacccaaaagttctgaaacaacaacatttgattcaattactgaatctggccaggtttccataaatgcttcttctgagtgaatgtcttctggacgaataccaaagactaagtctttgtcgttgtagcctttttcttccagcagttttgccttaccttcaggaataccaatattcaagcctttgccatcagaaattcgaccgtccttgtagtgaacattgaagaaattcatttgtggggaaccaataaatccggcaacgaacatgttaactggcttgttgtaaacttcaagtggtgagccgatttgttcaactctaccaacagacattacaacaactctatcagccaaagtcatcgcttcagtctgatcgtgggtaacataaatagttgtagtacccaagtcttggtgaagcttagcaatttcagtacgcattaccacacgcaatttagcatccaagtttgataaaggttcatccatcaagaagataggtgacgcacgaacgattgcacgtcctaatgcaacacgctgtctttgaccaccggacaaagcacctggcttcttatccaagtactcttcaaggcctaacatcttagctgcttttttaaccttttgatcaatttcatctttaggcgtgtgacgcaactttaaaccgaaggccatgttgtcataaatggtcatgtgtggatataatgcgtagttctggaaaaccatcgcaatgtgtctgtcctttggagcaacatcgttcattactttatgatcgatttctaaggtacccttactgatgtcttccaaaccagcaaccattctcaaagtagttgacttaccacagccagatggaccaacgaaaacgatgaattccttatccttgatatgtaagtcaaagtcgttaacagaatatctgtcgttacctgcatattttttgtaaatatggtttaaatcaacctcaaccattgtttcccctactctctttaattatttttcattaaaaactttttcaatttcactcaatttcaactcagcagttgttggaacgatgtaatcagcttctttcaaaagctccttatcaccaattcctacggcaaattgacctgcagccttgattgcttcgactccagctttggcatcttcaaaactgattacttcatcagcctttaaccctgcaatttcttgcgctttgatgtaaatttcaggatctggcttaccatgatgaagtgttgctggatcaacaatgccatcaaattcatccataatacctaatctagttaaaatcttaggagcattcttagaagcagaagcaattaccatctttaagttttgcttcttagcatctgccaataactcagggatcccaggcaaaatgtcctttggcgtcattgtttctacttgttcaacaaatttagcgttcttttcagctgcgaacttttctttttctgcttcagtatatttgtcttcttgaccgccatattgcaagatcaagtttaatgaatccattcttgaaataccgcgtaagctatcgagctgagaatcagtaagtgtaatgcctaattctttagctaaattattccaagcagtcaaatgaaacttagctgaattagttaaaacaccatctaaatcaaacaataaacctttaagcattttgcgtttcaccttctttaagagtaagtttttggtctttaactacaacatctaaatcgtcacctttaagcaaggtaagttttgtttcattatgatcgacataaacttcgattaagcgaccacggtagttaatcttaaagccgtagtgatcccacttgtctggtacaaatgggttaaatttcaattgatcatgatcataacgcatccctgcaaaaccttgaacaattgctaaccatgaaccactcattgaagtgatgtgcaaaccatcaactgtatcgttgttgtagttatcaaggtcaaggcgagcagttctttcgtataattcgaccgccttcttttgcttgccaagttcagcagctaagattgagtggatacatggagaaagtgaactttcatgaacagtcattggttcgtagaagtcgtagtttctttccttttgttctttagtgtattgatcattcaagaagtagattccttgtaaaacatcggcttgcttgatgaatggtgaacgaaggatcttgtcccatgaccagtgttggttgattggacgctgatcttcaatttcgcttactggacgaaggttcttgtcaaggtagtcatcttgttgtaagaagatgccacgttccttgtcttctggtaagtaaatcttgtcaacgatgtcttgccacttcttcttttcttcatcagtaacattaaccctggcttgagcttccttagttgctaatggcaaacgctccaaagtgtacttaagtagccatcttgccatcgtactagtgaaccagttgttgttaacgttgttttcgtattcgtttggaccggttacgccatgcataacgtacttgttacgccacttggaccagtggactctagctgcccagaatcttgctgttccaaccaagacatccattccttcatccttaacgtatgaatcatcgccagtgtatgacgtatattgcttaatcgcaaatggaatatcagcattacggtgaatttcttcaaaggtgatttcccattcattgtgacattcaatcccgttgaaggtaaccattgggaacaatgcacctggtaagccttgttctttagcgttatggtatgcgcctggcaattgatcgtgacggtattgtaaaagtgcccgagtaacactaggatcagtaacacataagtacattggaacaatgtaagcttcagtatcccagtaagtagcaccaccgtatttttcaccggtaaaacctttaggaccaacgttaagacgttcatcttcaccgtaataagtcatgaataattgacaaatgttaaagcggataccttgttgagcggcatcatcaccagcaattacaacatctgatttgtcccagcgcttttgccaaacggcttcatgatcagctaagttttcttcaaaactcttagcttgaagcttggtcatcaattcagctgccttagcatcttgatcatctggtttgacgtcacgactagtaacaacaatgacatctttttcaagatcgtagctttcgccttcatttaactcaactgaaagcttttcatgaagttgggctgcttcagttgaaacatcacccttaactacttcaccattatgacgaagactttgcttaaggaggactgtaaattgtggaaccttgtatgggttagccttagtttcaaccttaatagttcttgcttcagcattttcacctaaaggcatccagaattttgcatcgtagttactgtcttcgttaacaacagttccatcaagtgctgcatcaaagtcgattttagctttaccacttaaaacggtagccttaactttaattaaagctgcttcttttaaggtaatatgtaaaaacctttcgaattcgaatttaaccttagtatccttaccttcataagtaaaacttctagtcagaagaccttggtgcatatcaagtgctaagtagaaatcactaaacttaactttagctaagtcaagtttttcaccattaatcgtaattcccatgttgatgaaacttggtgagttaggaaccttaccaaagtactttggatatccgttcttccaccaaccaacacgcgtcttatcagggaaccaaacaccagcaaggtaagtaccttgtaagctgtcacctgaatagccttcttcaaagtttcctctcatacccatgtaatcgttgccgattgcagtcatactttcttgcaatcttttatcttttggttcgaacttatgggtaacgaccttccaaggatcaatttcaaaaattcgtttcatatattctatctcccgtaatattcgaggttctctcttgtttacgctttcattatcctttagttgaaagcggtttacaatattaaatctgctgttaccgttatcaggattagttaatagaaaaagaaggtagatcttaatctgccttcttttttgcttattaaaagtaacttttaatgaacactcactacaaagccttttggtgccaattgattattctcataatcttgactaaacgtgttctcacaattgatctctactggatgatcggtcgtgttaaagtatgctttaattctttcattcccctcacgatcgacctcaattaacccattctctgttacgtgtaacttaattcgacctttaccgaaagtttcatcatgttgcaaacgaaagtcaatcaattgatgaactcgttgccaaaccgggccgtcttcttttgcccaatccattggtttacgacaatcaggatcgttgccaccagtcatacccatttcagttccataataaatgcatggactacccttttgcataaattcaaaagctaaggcttgcaaagccaaatcttggtctccattagctactgtcaaaattcgggctgtatcgtgtgaatcaagcatgttcatcatggctgcattggtagcatcccgatatttcatcaactggtctgtcaaacgactagttaattcttgtgctgacaacttgtgcttaaagaagtgatcctcaatttgcaaagtatatggataattcattacgccagtaaactcatcaccgttaagccatggacgagctgagtgccaaacttcacctacaatataaaaatctgatttaatatcagtaacgaccttgtggaatttcttccagaagtggtggtcaacttcgttagccacatctagccgccaagcatcaatatcgaagtattttacccaataagtggcaatttctaataagaaatcctgtacttctggattagctgtgttcaactttggcatatgcttttcaaaggcaaaagtatcgaacttaggactaccctcaccctttaatggatcgcggtaaggttcaactggatattcattaatgtggaaccaactagcaaaacgagaacttggaccatttttaacaacatcttgccattgcattgattgatcacccaggtggttgaaaaccgcgtccagcatgaccttcattccgcgggcatgagcttcattaacaactttcgcaaataaatccttgtcgccgaatgccggatcaacttgcaaatagtcaatcgtatcatatttatggttagaactggctttaaaaataggacagaaataaaggccattaacacccagtttcttcaagtaatctagatggtcaagcacgccttgcaggtcaccaccatagaagtcttcgcggccaggatgatcctccggattccacgctttaaccccttggggatcattagacttatcaccgtttgcaaaacgttctggaaagatttggtaccaaacagtatgcttaacccattctggcgttttcaccatatcaatttcatggcaatatggcactttgaaataagaaccatcttccataatggccttgtctacatcactgctaattgcacgatcacctacaactacactagtgccatcactgccaattacttcaaaggtatacttcaaacgatgatatggtgcttcaagcgtaatgccccaatgatcttcacactgccctacgccaattttttccatctcacatgttttagcctgttcaagtggcaaataattatcgcagtagtgaacaattacttttttaacgtcatttttagcactgtgaaaacgcacgcgaacatgacttggatcaactacaaaactatcttcactttcagttcggtgtcttaaagctgctaattgcatatattaattctcctttttcaacacaacacctgcataaggcatcaaagttaatttttcattagttaattgatattctcccgcttttagtgttgcaacagtataaccggctggtatttcaacagttgtcttttgatcactcaatgaaacagctacaatggcactttcatcatgtaaatcacgttgataaacatagctattcttatccgttgaaatcatataatacgttccagtctggaataaggcttcttttttgagttccagcagtttttggtaaaaattaaacatgctggtggtatcgttaatctcgttagctacgcaagcatcatcctgtttaatacctgttatccatggtttaacttcactaaaaccatggttctcagttgcatcccacggcattggaccacgggccggcaatttatgtgtttcactagccatagctaaggccgcatctttgctcaaaactttttctgcatcctttaaccatggcgctacaatttgatcttcgaattgatctgcactagtgaaatgtagattctttaaccctaattcttcaccgtaataaattactggaattccgcgttgcaaatacatcaacatcgccaagctcttagcctgagtttgtgtcttagctacgcgtgtagctaaacgagccatatcatgattattccaataaagagtaggctgcgatacgcctgctaatgtttgttgccaaactacttgattttgtttaaaggcagtcaaatctaatttcttaggctgatattgctctgaaaaacgttgatcacagttagaatcatcatcggtaaagtaccggaaggtaatcacactatccattaagtgattgcgcttagtcgtgtaatcaacagccaagttaacgctagcacttgcagcttcacctaataaaagcgtatctggataatcctgcttaatctgctcacagaaaggccgcatccattcctgcacctgtggtaagttagcgaaaaatggttccgcaacgattggcttgtttatgtccccatctccagttggataattttgtcgcaaatccgccttgccaatatggataaaagcgtctaaacgcaaaccatcaattcccttttttagccaatattcagctacctcaagcatggcgtgacgaacttcaggattcttccagtttaaatcaggcattcgcttatcaaataagtgaaagtatgattgaccggttccagctggatctggctcccaaacgctgccaccaaagaatgacccccaattgttcggccgcttgccgtcatgaccagcaaaaatatagtagtcacgatataggctgtcaggattcttgattgcgtcttggaaccaaggatgttgatcagatgtgtgattcaagaccaaatccatgatgaggtgaattcctgccttgtgcagatccttgattaagttctccatatcttccattgttcccatgtgtggatcgatggcgaagtaatttgaaacgtcgtagccgttgtccacctgtggtgaaacaaacactgggttcagccaaacggcgtttacgcctagatttttcaagtaagggatgcgcttacgaataccgttaaggtcaccgaggccatcgccattgctatcttgaaaagacttaggataaatttgatatataattgcgtgatcgtaccaatgtgccataattaatttcctccacgcatagtgtaacggattaaagaaaccgttttcaacaccatatctactgttatcgatatcaaaaaagcacaactcgcttttgagttgtgccttttcttctattcaattactaacttttagttgtgcttacgtttccgatcaacaccaaagcctaaaagacctgcaattgaagctaatgctaaaccaataatagatgctctgttttgtttttcaccagtttgtggtaatgtcttggcattcttttcagcttgaacagcagtattattactgtttgcgcgcttaccatgaacattgctattgtagctgtgattttcactattcaatcctgcggcctgattattccctgaattatgcttagtctcggtccgaatattttgaccattatttttggctttatgatgatctgctttcttacccgaattatcatcttttccaggtgtcttatcagttggtttattatctgaaggtgtagtattacctccattatcagtcttaacaactggaacagtgattgatgaacttactgaagctgaggttggagcattgtaaccatctttgatcttatatccagctggcacaccgtttttaatggcacttgaaggatcaatagttgtaccttcagtacctggaatagtggttctgccaacttcattaccattttcatcacggtagataatggttacttggccttgttgtggagtaggaggcgtgatttcaccgccaccgtttttagtataagtaatagttacaacagcatccttagtatctgcagttggagttacttcagcaacactatcttgacttggagtaaatccagtaaaggctggagcagtaaaggctggccaagtgctggttgcgtccttgtcaatgataaacttatcgttttcaactttacctaattgccagtcaccgtaaactgttttgacatttggatcagttgaaacagtcttggtgcgaccgaaccatacaacttgagtagaagtatcagtcttacctgttacaggattcttaacgttgattgtacgagttggatgagcgtacatatcactgttttcgcctggcttgtttggattgattgttgggtcggttggctcagtagtcttagtgtaagcaactgttacattagcatttggagtgtcagcattgaccgtctttgcatcaacctttgttgcttcatgcccattaaccgtggacttgtaaccgtcaactggggtgacatcatattcttgccaactaccttcagaggcaccagttgacttccaagaattattatccttagtagcaactgtccattctgtccaagtaatattaccatcttgatccttggtgccagcattttggccttcaccaccacggacaaagtgaacattttgggtaatgatgtcggtagtaccatcagtcttataaatcgtgatggtccgagtgacatccttgttcatatctttgtcggatggattgtatggaactggggtgatgttgtcagactttaagtaagtgatatgaacagcagcaccatttactggttgaccattgttaagtgccgaagcgctagaaacagttgtagtcttagttccattaacatatgaatcataatctgaaatttgtggtgcattcattgagacaaattctggttgaccacctaaaacaaacttgtggttttggatagtgcctgcctgccaattacctgtacccgtaacttcaccagttaccaagtcttcaataccattgcggccaaattctactgattgagtgtcaatcttcttttcagcttcacccggtttagtttggtaaatatcacgagttactgtcttgaacatgtccttgtacttaggatcagttggatttacgcctggagtggttggagtgatgtccttagtaccatgttcaacaagaacttcaattgcacttggagcagtagtgttaactgtttcagctgatggataagtgtaactctttgaaattacccatttttctggaacattactatcaattgtattcttttgagcttctgcacttacaattgctggagtagttgaagtaaattgtcccttaattgcatccttagctgtaaaaatcacattacctttcgcatccttataaacaatgctttgagtaaagttttcaggtgttggagttgcagcttcaacattaattgttgcaggaacatcaagataagtaccatcactaaagttaattcttacagtacccttaacgccatttgcaatattcttagttgaaggctggccattttcagcccaggtcatagtgaatgtcttggcagaatcattggcttgtgctgaatcagatgaattagtgccaccccagccattttcaagactattaacattaatcaaagtcttaaattgatcttgacttaagttagaaatattttgattttgcttgaaagttaatgactgattagtagttgaaccatagaagttgaagtaagtgttcatccaactgtcttgagtagataaaccaatgtagccgaataaatcactgtcatcaaagctatagtttacacgccacttagagttacctggtaggctttcaccagatgaagtttgttccttagagttaggatttgctggatcatagagaatatcaccggtaccatttgtaatatcccaattgctatttggagttaagataccattacctgctttgacccagctatacttaataacatttgcatcaaagctatctgacggatcttgggcattcacatacttatcaccttgtaagttataagtagtaactgtcttgtagtcacttgctgcactacccttaccatcccagtcagttctgtagacaatttgttgaatcttagcgatattaggatcaagttcatgactatcagtggttctgtgaactgaaatagttggtgtgatgaagctcgtcatactttgattgccatagtaggtatgatgctctggatcattaccagttatcataactggagcagtaaccgtttgtgtatccttacctggaacactaactgtaactggaatcttgtagaaccctggtgttgcgtcttgccctggcttcaaagtaatcgtaccagtagttgaatctactgttgcccaagttggaacgttatcacctgctacaaatttagtaccatcaggctttggtacaccatttgttgtaacaactggatcagatgctgtgctccctttttcaacagtaactgtcttataacttggactatattcacctgctggcacagcattaattgcaccatctttggtttgaacgtctaagtaagttgggttaccttgagcatccttatcagtaaaggtaagtctaatagttgcctgagtatcaccagcctttggtgcacttgcccatgaagcagtgtactgaataccggcattatctaagttaaaagtatcaactaaatcattcttttgagcgtcggttaaatcttgacctacagtaaccttaaccgggttagttacatccttagcagtagcaccagcagctttaatcgtcattggattactgtcaacagtagtgtcaccaactttaactgatacagtaccagttaagtcttcacttgcagatggagtagttacaacagttgttggagcatcgcccttccaagtaatgattgcactagtcttatcaactggcgtgctggttaccttaccatcttcaccaacagtgtattgattaattgcactaactgcttgacctgcagtcaaattcattgaattatctgtagtttcatgagctttatcaaatgcacttggagcagttacaacttctagggcaccagtcttagtggggtcagttggatctggaatgatcttgccagtgtgagtagcattgccaacataaactggtacgtgaactgtatccttagtagtatctggatacgttacaacaactggaattgtagtcaagccagttggcgtttcagtcgttggggcaattgttaaccaaccagtattaggatctactgtagcaaatggtgtgttatcaccaacaattttatacttagtaccttctggagccttgctacctgggttgattgttacagcactgccttgtggagttgattcaggatatgaaggatcttctgacttagattcaccttgttttacgttcatcggatcatatgaaggttggtaaacatcagcatcagggttagtgatatttaatggaatattagcaaaatcaacggtaccgtcttggtaggttacctttgcccaagctgacttatcgctagtcttcaaattaccagttgggttagttggagcatcttgaccgctcattaaatcttgccattccgttgcgtcagtagctgcattgtaccaatctacatttttaatagcagaaagatctggtgttatggttccatcgctagtccgtaacccagaaataccgtccttggcagttaagtcatttaaggtttgtttagtattaccatcaatagtcttgactactggttgatattgaccagaatcagttggcttagctacttcttctaaagaactacccattgcaactctttgtggagtccaccagttgaagttattcaagagtcggtttaagtatggagtttcatattttacaccatcagctggttgaccttgagtaactgttccatcaataaactgaaaactattaaacccagcttggttttgagcaagatttacttgaccgtttgagtgtaaaaatttaatttcaccattcttattttgtcctagagtgttgccggcttgagtaaagccagaaattgcattatcaccccagttgttttgagtttcaatattattgagataccagtaatcagatgcacctgtgcctttatttccttcatcccattgagcaaatggcaatttaccacctgcactagtaatagttacattattatttttattttcaagacgaagtaaagtacctgtttgatttccggtacgctggaaatttacatacttagggttggtaatagtaacatggttatagctatcaccagttccaccaccccacatagttaccaagccatatttaggagtattagtgaagaaccctttcgtaactgaatttagaactggctgagcattatcttgtaagtcaagcgtcgcaccttcatggacattcaaatcccacttagagcttgaaccactgcctgaaccaaatgagattaatggtgtagtagattgattgttatcaccagtacgaacaattattaatttaccttgattatctaaaacattggaatcagcattagtaatattagcagcaaaaccaacacctaatgaaataggagcaaagtggtaaccatcataattagttccaccattggcaccactaccatcattactttgtttagtattgatgttaacaacaccagttttgccaatgtttaagttaccagcccaaatagccattgagtgaccatcagccatgttggcatttaaattaccgtcaacttggacagtaccagtaatagcgctgttgacaagcatccctttaacatctttagattggccatttaaggttacggttgcaccttgttgaacatcaattgctggagcagtatcatttgtttcatcttcaactttggcccgcaaaatattgccaccagcgttttgatcgttgttagtcttagctgaacttacgttaaagatagtgttagaaccatccgcaaaaataatgtgtgcagctgaaacagcacttgaataattagaaacttgattccctgctacattaacggcttcacaagtgatattgttattacccttgaaggttaccgtagtatacggattatcacctatttgttgagccatcgtggtgttataaaaagcaccatttttaacatcagcagttacattttcaaatgtaaccttgttgttagctaaaagatcagttcttatgtcgtttccacccatgtaaattgggctaaaggcaccaccataactagaccatgaattatcataaccatcagcgttaatggttaaattcttgaaagcaatatcccaaggattactatctttttgattgttagtagtaaagctaagataattagcaccaaagttaatagcgtgaccttgaccatcaatatctaatcctccagaaatatttgaaccagttaagttcatctttccagagttaactagtggttgcggacgattaataccgttaacatttgtacccttattagcgacagtaatgtcactagttaatttaattgtaccgatattatagtcgtttaaagcattaactaatccttgccagtccgctacttcttgtgattgagtaccacgtaaattttgttgagtggtagctgcaacttctctaggttgtgcagctaaatttgctccaagctcttttgcaacttcatctttggtcttcttagcactgatattattgtcttgctcatttccaagtgataaaacattaaccttaccacgcatggtgctagttaaatcgttttagttaataaaaaagtccaatcttgttagactcgacttgtaaatagtaataatagaaaagagtctgatctgattgaactgccttaagcttaagcgttttagccaccatttacaagttagttttaaagatttagtgataatttgtcggcactggtatcgtttgtatgcaccggctgagtttactcatcagcgaaatattgatcaaattaaaactacggacagtctgattttggctttacttatctggcaagctaagacaggaattgaatcacaaagaagattctgtgaatgtttcaattgtttatcacactcacgttttaatcggcgttcacgtcagctattgcaattgatttatcagatacggcaagaaatgaataaaaaggttgacctgaatggacatttcttgatcattgacagctttccggtacctgtttgccaaccaattcgcaactatcgtgctaaaatttttcgcggttatgccaacattggttataaggccaccaagaaaatttacttctatggtttcaaagttcatgccattgttagcgatgacggttccattcttgattatgtcgtaacaaaagcatcagttcatgatgccaaggagacagttgaactgctggaaaatgcccatccatctaattactatcttcttggcgacgaaggctatttaggcaaagaactgcatcaacagctaaaacaaatgggttatgaactttggacaccatatcgtaaaaatatgacaggagctaaaaagcacaatgatcatcaattgatggctattcgcagaacaattgaaagcgacttttcgcttctgacctattacaatgccgagaacaatcgagcacgtagtctgataggctttcaaagccggttggaaattgcaattttagcttataatttggcttattgtctagaaagatttaactagcaccacgcgtataattcttatgtttatggacagatcgcgtatttaactaaccgtgttatcgaggaagttcacgaaaaagagaaaattatttctgaaatgcaacacgaagcggaagggttgtctgaatataatctactcttcactatccctgaattcggtgttcgaactgttacttctttgatcggtgaattaggagatattcgtcttttccatagtagtaatgctcttaatgcctatatcaggattgatcttagacattattatgaatcaggtaactttgttgccactgatcatattagtaaacgtggtgatgcgattgcacgtaaaattctttttaaatccatccaaaacattgccgtggcaagtcattttcatcctaatcatattaatgatttctatcagaaaaggaaaagacaatcttctcagccagaaactaagaaaattgccattgccgcgatacaccgtcttctcagaacgatttatcatcttgtaaaatataatcaaccctataattatcaaatagctaaagtataatttaagattgattattactattattgtgcaacccatgaaaaataaatctagttcatgagcttgttttgttatactttaaatttaactttgagccattttaattatttaattaacttttctatccagctaaattccaaggaattcctttaatatccttgactattcgtagaaaaccaaaataagcactgatgttaaattcatcagtacttacaattgtagagtccctttgttcaacccgtattgataacgactgcttacaataataaaattaagaccactagaataacagcttatggttttcgcaactttgatcattcccgtatccgaagtctactagctctcaaatctcatggtaaaaactaagctaaaagaaaaggtcagctcaagcagcttcgctacttaaactaacctcatcaaaatacctcatcagtactgacaaaggggtaaaattgtagagctaatttgattacttgcgcttcttgtttacagcagcaaggccaaacattcccaataaggtggaggcacctaagcccattaatgttaagctattgtcattaccagtttgtggtagttggttatccttagctgtcgttggttgagacgtaatcgtcttcccagtttgcatgttaggaacattaccttctagtttgccagtaacagcatttccattaggagtagtgtttgtaggcgtattagtagctggtgttccttgtccttgatgatcattagttgttggttgaccgccattagttgggatcaaccaacaactaatgatttgattagggttaccatccttgaaggtgtaagatgttggaacactttcaccaggaactaattgataaccatcaggaatgtgaatattaactggaactgtctgaccagacttgccaggattgtccggaagcttatcgcttggtgtctttggatcagttgttgttgtctctggcgttttgggatcagttggatctgtgtccttagtgtaaacaaaagttgtggtgtattggtatacagtatactggccactcgttactccaagagtacgaacaagacgataacctttaattttcttaggttggacttgccatggaccatttgcataccagcctttttgcggattaaccccattatttttttggttaggattatctaggttgaacgcaagcgtatcattattcctaagcacatttccttgctcatcaatgtacctcacagttactggtttgtttggtagcaagtaaacatgtatccccttagcgtaccaattgaaataatcagaattaagatatgtccctgtacttcctatataggagtaaccttgtttttcgtaatggctaatctcctcactcatttttttctcataattaccattgtttaggtcaatccttttgccatagctaccagcaatcgtaaagaatttgtacggtagatttgtttcttctggaacaagtaacaattcagtcctattactatcagaattattttttataaccttcttatacttgaaagttaaataaacatagttaggatcagctaacgaatttcgagtttgaccagtgattttaccctttaaaacaggttcagaaactaatttatatccaggaatattaatggctgcggcttcatagcgtgatgcatccggtgctttcttatcaccagcacggtgttgtggagattcaggggccatccagaaactatctagaacgattgatgctaaaatatgcccgttatctacatcaacatactctactttgattggtgacaatgatgcgtaatctaaattaatgttaatgtcttgcgtagtaatacctttcttaaggcaggcattaccttgtttatcaaaatagaaatacttattcaaaacttctgaattcattaatttataaccggccacagtaaattcttgatccacactatcccctggtcgaattgtggtctgcttgaaaggttgtttgaatacataatgaccattactaatcacttgaattggcttatgtagggtgacatcgcgaaaattcatagtaatgttgtacttactgggcagtggttgttttgctgttgttttatttggaactaatgttgatgaagtttgatgaccaaccgtatttgattcgtcgctaatccgaatattgcttgaatgggcactaacttgtggatcagtcacttgagtcgtggatgtattttgagcagcaactgtcgtattatctgccttggcattaccactaataatgaaggttaagcccaacgaaactgtcaaatcttttgtgtaaatagttctttctcgtaaattgattttttaattatttatttaatcaaagtaggattctaaggtgtcctgaacctgaccaaagcctttatgaattcgattgaaataacggtcattgtagctcattgcctgaataccaataaaagcatcaagcgactgttcagttggaaactctgccttaggcttagctttgcgcttgatcacattgttaaatgattcaatcatgttagtcgaataaattgaagctctgatctgcttgggatagttataaaagaccggcagatctggttctatgtctttcaagcttctgataacatggctgtaaaccttgccccatttggtatagaagtcatgcaggacagctgtggcttcttctttgtttgtctgttgatgcacctgtttgaattcgttcatgatcttttcacgatcgtcgacgcgtactttagcgcagatattacgcatgacatgaactaaacagcgttgaaaatgagcttttggataagtctgagctaaggctgttttcatgccaacaacaccatcagaaagaaaaagctcaacttgctttaagcctcgggatttcatgttttgaagcatatctgtccagacttcaatgttctcgctaggcgcaatgcagtagtcaatgacctccttgtgcccattaggcttgatgccaatggcaatatagactgcttcgcgctcaaatgtttctcggcgcaaaggaaggtatgtcgcatccaaatagacgcagaaaaacttgtcgcttagcttgcgtttgtggtaagcctcaacctttggaatcatctgcttggaaatatttgatacctgagctggactgtaatggctgccatacatcttttcaattagatcggctatttccctggtggtcacgcccttggagtaaagcttgataatcatgctttccaagatatccgagtgctgcttgtagtcaggcagcgtgtgctgatgaaattgaccgttgcgatcccgaggcacttgcacttcaattgggccaaattgcgtatcaactttgcggaaataagcaccatttctagagttgccagtattccagccatttctggcatagggatcatagcccagaaaggcagtcaattcagcttctaacaagttattaacagcctgttgtagctctttgcgcaataaatcatttattttgtctggattgaatagagcttgagcaaaatctttggtaaaatcattcatgaaggagttcttctttctgtatgtgtttttttgttcaaaccaatcatacgagaaaggaactcctttttctaatgtttaaagaaataaatttaaggaatcattcatccttacacaaactattttacagtctcaaatcaagctcaagtcctgtcactattgagctttcttagacgtaattagtttttatatgatctgtttcagtgcaatttgtatgaatcgtggcagttggttaataaagtcattgattacttcatctatcttttcaaaactattctgtttaagctcttttaattctgaaattaagtagaccaatgcatctacgaatctaatatcaggtaaggattcgttcattagatagaataaatctccgattgtcttatcatctgtattttgtctttcctgccaggtcaatagatcataagttattgctgtaactgcgatatagccacattggccatcatagctttgaacttgagatttatctaaagcaagatattgcttagacgtcttaaaatatgtttcaatttgccatctacgaccataaagttggatgatttcttcagggctaagctttgtctgagtagtagctaaaaccaaatgcttgttcttgtttccacggttggagacaaagacgagctttaataaaaagctatgtccatgatattgagcctcaactatgcttgaataaagataatgtttctttttacggatgtttgaagcagccaaacgatcatacaagtctttaacgctatagcggcgatggcgataaatgtaataaatctttgaactcttcttgatcatgccaagtccatctaaaccgatcttctttaaaatccaaaacattcttggagaagaaaaccaagaatcgaataagacgtatttagcttctactcctaatcgtaaggcttgtctaatcaactctacagttacatcattcatctttctctgagcttgatttctccttttaccagaaattgaacgttcatcagcagtaatgggagcagctccaatcatatttttcttggttttggttgacatcaaggcaaagttaaccggcaagaaggtattgccatcgctccagcctaaagttaaaccacgatatccgttcaaatactcatgcttgtcatggtcatagactttagctagcaattcggtctttttagaaaaagaccgagccatcagcgtatcgtcaacgataaaagcaagtcggcgtcttttatcgataaatggttttaagcagccaatgagccgggctgcaatcaagcataatagtttttgccagttgattcttccatcgttaagtacattgcgagcagttctaacggaaaaacgtttgtcatccttagctctgaataaagaaagccgagcaaaatgtactgacatcagccaagagataatcatggttaatgaaacggtggatttacgcttaaaattgacttgtttagttaacttagctagaccaattagattaataaatcccggatttaaaattgaagtgcaacactaagtgttaaacaaaaaggccatgaagacctaaacttgaagtgacgaaaaatcaagaaaggaagatcttcatgaccaattcaaattctagcatttctaagcactatcatcaattaaccagcgtacaacgtggacaaattcaagcaatgctggattccggcataacttcccgtactgttatcgctcaagaagttggctgccataagtcgacaatcagtcgcgaaatcaaacgcggaagcgtcctgcaaagagacagcagctatttattgtatgagcactattacgctgatactgcacagatttattatgagaagcgtcgcaaaaactgctatcagcgcaatccattgaagcattatgctgtctttttgagaatgctctccagacgctttaaagctaaatttgatgccaccagcatcgatgagttcgttggtgaattcaaaaggactatgccaggctacccttgtcccagcacaccaaccgtctatcgctatattgatcagggcttgctggacataagcaatattgatctgcctatgaagctcaaaagacgcaggaacaagcgtcatcacagccatggcggtcacgctttgcacaagaagcatcttggcaattccattgaacagcgtcctaaggaggttgaagacagaaaagctccgctgcactgggaaggagatctggttaaaggcgtcagacgcaagaatcagcctgctttaatgactttgactgaaagaaccacacgctttgaagtagttatcaagattcctgactatcgggcaagcacatgccaaaggctgcttcaaaaggagattgacagacatcctgcctggtttaaatcaatcacgtttgacaatggctctgagtttgcggatatgaccaagatcaagggctgccagatttactttgctcacccatattctccatgggaaaggggcaccaatgagaactgcaatggtcttttgcgtcaattcttccctaagggcaagagcatgaaagacaagtcaaaagcttatgttcaacaggcaactgatgccattaaccacaaatatcgccgaatcctccaatatcacacagcagaggaactcttcaagcaatatatctcttcataacctaactgttgcacttaatttgacaattcaggtagattaataaatgaagaaattaaggatttagtatcattttctgtgtcgatttgttctatactgttcattgcgcaggatctcctttactttttaggtcgacacttaaagtataacgcagagagatcctgcgtttttatttttgataagaaaaagccaagaggcgcggggaaggagcgttaatcttagctttcaagtttcagaaataattttaaaagcagttaaaaagcacctctgagttatcagacgtgctcgttatcttttcgatttatctagttgattggcgccgaatcagcttcggtttaagcattacttcaccttgaggtgaacctgattgggcaatcttttgcagtagcattttagctaacatttcacccatttcaaaaattggttgtttaattgtcgttagctttggattagaaacttgatctaaaaagacaccatcaaaaccaataactccaaagtcttccggaattcgagcgccttcatcttgcaattgccgtacaacacccactgcaattcgatcactggcacagacgaaacaagtatcttttttaaattccttaaaatgttcatgaatcacatcttgcgcagcatgactatgattagaaacccgaaaaatttgtggtatcaactggtgttgttgcaaagtgttgatataaccagcttcacgtgaatattcaaatggctcttttaaatcaattccaataaagataatgtgcttatataaccggtctaaagcatattgagtagccatcttctctgctaactgattatcagaatcaacaaagtcatagccgcggtgattttcaccaaataaaacaaaaggcttatcgagtttatcaaataattcataatctttgtttcgcgccccggtaattaaatagccatctgcatgttccttttcaatttgattaggatccgtaactaattgcatcgcatactgcttagtatttaaaccacgagcaaaaccaaaaagcaagttcatatagtatggctcagtggtatcaatatcttctaaagtgacgaattttaccacgttagtccgattattaactaaagcctgtgcaattgaattgggatggtagtttagtttctccattgctttttctaccattgctcttaattctggcgttacttgctcaggatgattaatcactcttgataccgtcatttttgatacatttgcttctttagcaacatctgataaagtagtcatattattcctattctaagtacatctttctgaatcggtttaaatctttttggctaaagccaagctcttttttgaaaaatccatcaaaactgccccagccttggcgaatagtttccgtaattccacgaatagccggtccctctcccttggtaatattcattttagaaactaggctagcaatttcattatcatcggggaactgtttagccaaagcaaagtcatacaattcattggtcaatacgcgtggtgctagttaaatctttctagacaataagccaaattataagctaaaattgcaatttccaaccggctttgaaagcctatcagactacgtgctcgattgttctcggcattataataggtcagaagcgaaaagtcgctttcaattgttctgcgaatagccatcaattgatgatcattgtgctttttagctcctgtcatatttttacgatatggtgtccaaagttcataacccatttgttttagctgttgatgcagttctttgcctaaatagccttcgtcgccaagaagatagtaattagatggatgggcattttccagcagttcaactgtctccttggcatcatgaactgatgcttttgttacgacataatcaagaatggaaccgtcatcgctaacaatggcatgaactttgaaaccatagaagtaaattttcttggtggccttataaccaatgttggcataaccgcgaaaaattttagcacgatagttgcgaattggttggcaaacaggtaccggaaagctgtcaatgatcaagaaatgtccattcaggtcaacctttttattcatttcttgccgtatctgataaatcaattgcaatagctgacgtgaacgccgattaaaacgtgagtgtgataaacaattgaaacattcacagaatcttctttgtgattcaattcctgtcttagcttgccagataagtaaagccaaaatcagactgtccgtagttttaatttgatcaatatttcgccgatgagtaaactcagccggtgcatacaaacgataccagtgccgacaaattatcactaaatctttaaaactaacttgtaaatggtggctaaaacgcttaagcttaaggcagttcaatcagatcagactcttttctattattactatttacaagtcgagtctaacaagattggacttttttattaactaaaacgatttaactagcaccatgcgtattggtcaataaataatcacgcgaaatggtgtcatcatcaacacctaatgcggtcaaaattaacgccgaagtcatgcctgttctatctttgcccgcactacaatgataaactaacgcatcttcttcaggtaattcaatcaattccgcaaaaattttagcaaattcatgttggctatgtgaattaagcaaaacctgttggtaaatttgaccaagccaattgtcacccatatcaggaatatgatggacaaagcgatataacttgttatcgcctttattttgcttgcggttttcagaataaatatgtgcatcaacaaaacggacatttgaccaaagcttgtcaggcgctgaattttgttcatatttagagcgtaaatcaacatctacggtaattcggcgttcaactaacttttcttgatcttccttcgacaaggagctaagtgaatcagaacgatatattttgttccactttacatgttgacccttgtcattttggtagccgccgatgtctctgaaattcagcggtccatccaaagctaatattcgatcatgcttcatttttccttgcctttcctcattaaagtgttaataccgtacttttattatatcattatcagtcatgtgcaaataaccgagcggcacgaattgctctttgccaacctgaataaagtttttcacgttcaactgcactcattttcggctcaaaggcctgtccaatcgtaaaggtatgctttaactcgtcaatatttttccaatagccaacggcaaggccagctaaaaaggctgcacccatgctggttgtttccagcgttttagcgcgttcaatttcaatccctaaaatgtcagcctgaaactgcatcaggtaattgttgttgctagcaccgccatcaacacgtaaagcaggaatttcaatgcctgaatcttgttgcatcgtatcaacaacgtcacgggtttgataagctaatgactgcaaagttgctttaattatatccttgtcagtagttccacgtgtaacaccgaagattgaaccacgagtctccgcatcccaatatggtgcgcctaacccagtgaaggcagggacaacgtaaacctcgttctctgatgtcgactcaagcgctgcttgttcagagtctggcgcatgcttaatcaacttcatcgaatcgcgtagccattgaattgcactaccagccacaaagattgatccttctaaagcataagtaatcttaccattaatgccataaccaatggtcgttaacagattattgttagagtctgttggcttgtcccctgtgttcatcacaataaaggcaccggtgccatatgtgtttttcaccattcctggtttcaaagctagttgaccaaataaggctgcctgttggtcaccggccatcccagcaattggcacttgtccaccaaagaacatatatgacgctgtttcaccataaatctctgaattcgagcgcacctcaggcaacatttgcttaggaatattgagcaaatgcaaaatatcgtcatcccacttgagcgtgtgaatattaaacagcatggtccgtgaagcattagtgtaatcagtcacgtgtttagcaccatcagttaacttccaaactagccaactatcaatcgtgccaaaaagcaactttccctgttcagctttttcttgcgcgccaggtacatgatcaagaatccagcgaatcttagttgcactgaagtatgggtcaataattaagcctgttttttgacgaatttcattactatagccttctttttttaatttttcagctaattctgttgtctgccgtgactgccaaactattgcatgataaattggctcacctgtatccttgtcccaaacaacggtcgtttcacgttggttggtaatgccaattgcggcaatttgattaggccaaatgcccgaattaataaaagcattggcaattgttgtttggaccgccatccagattttattagcgtcatgttcaacccagccaggctctgggaaatattggtgaaattctttttgggcagaagcaacttcacgtccatcatggtcaaaaataattgctctagtagaggtggttccttcatcgattgctaaaatatatttttctgtcacagttattctcttttctacaaaagcgctttcttataatattactgtttttctgatgcagattctagcagttaatgtaatagatacggtataatttttataaggattttttaaggagggcattttaatggaaaaaaatcaaaaaattgcggtaacaattgcgggtaacgatagcgacggcagcgcaggcatgccagcggatctgcattcattctacgcccgcggtgtttatggcatggggctgatgacagccgctgttgctggcaataccaaaggaatttttgcccaacaaattatgtcacttgattttattcaaaagcaatttgatgtactaaacgatgatttcaagattaatgcgactaagacggggatgctcgccaacaaagaaattatcgactgtgttgccgataatcttaaaaaatatgacatgggtaaaatcgtgctggatccggtcatcgttactaagcatggcgctaccctgcttgacgacgatgcttatcaaactttcttagacaaattattgccgctagctgatgtgattacgcctaacttttacgaacaaaaaaaactgaccggcttagaattaaataataaagaagaaattcacgccggggctaaaaaattgcaagcgatgggcgctaaaaatgttctgatgaaagggcgccacgattcagatacgcaaactacagtaaccgatatcttgttaactgaggacggtgaattccacgaatttactaagccattctttaaaaccgaccgcgtaaacggcactggtgatactttatccgccgtgattgcggcagaattagccaagggcaagtcagtgattgacgctgtaaaaattggtaaggactttacctatgacgctatttctcacccaattgatgttggctcaaaatggggcccaattaatcatttggctgcacaagaagaaaacgaataactataaaaaataccgaagctcagatttgaaacttcggtattttcgtgtctattttatcttctttaggcctactatttttcctgaatctagaacacttaccttcgttaattggttattattgtacttatatgatgtaccttcatccgaaagacgtcttgtgggtggtcatttgaccactctttttttacgcaaaaaaacagcaatgaaatcaatcattgctgctaatttgtttactttttctcaattacaaaataatatcctgctgtcaaaatttggacaattccttcaagtgcaatcgcccaatctgcaccgaaatgcgctacgatcagtccacctaaaaatgacccaatcggaatcatcgacgacaaaatagaatcgttaattgtttctactctacctaaaatatgtgggctaaaactctcttgcaccaacacttcaaagttaatattcatcatcacgatccataattcggacgtaaaaaacaaaatcaacaataaaagcggcatccctttgggaacaactggttcaaggacaattgctaaacctgataacgtgagacaaatgacgactaacctttcaattttgcttttatcaaaagttagtcgctgtaccagtacactgccaactaatccacctattgatgaagctaattctaagccaccataactaattgccgatttagtcaaatgttcagtcgcaaaatacggcaaacccacagatgaaatgccgtaaaaaagattagtcactgcaaaaggcatgatcaaccgtgctatcttgtcttcttgtttcaaattttgccagcctttaagcaaatcttgcccataattttctgtgaaatattcattcgacttatttggaagtaataatttcctaggcaatattagtcgtgtataaaaagctagggcgcttgcaaaaaatattgcagaaataattaccgtggagtcaaatgacatccaagtaatcaataacgttgccgctgcattcaaaaacaaatccagcgtcttataagtcatttggaaaacgccatttactttagttagcttcgcttttgaaacgatgactggcaaaattttttcttcagcaggataaatcaaagttgagccaatcgttgaaatgacgtatacccctagcaaaagccaaatcactaaatcgcgccacaacttaacttgaaacagcaacgtcgctataacgctggtcactatctgcattagagttacaagcgtaagcatctttttgatataaacacgatcaatcagcggcccgaagacgaacgacaacatttcaattgatgagtctgcaacaaagattaacgacaagataagcggcgaatgaaagcgtaccttgaaaaaccacaaaatcgccatataaaatagcgaatcggcgatattggttaacactcgtcctgctaataatcgtctgacattgacattttctttttcgattaagttaaacattttcccattccttttcacaacactattaatgccgctgaaagccagggaaaattactattcaattgtagttaaaactcccagaccttcagctaaaaatctgggttgagcctcaagtagcgtttgacgaatgaaagaaaataattcattcgcaaacttaaacctaaaatgtcacgcattttagtcctcgctttctgtgaaaattaagttaattatagcatggatagcgacttatcaataatagtcattctatccttatatttttcgtattttcattcaatttcaaatcatgacttatgataataaccaaattaacttgcgctatttcctgcaatagttttaatagatcactttgtaactcaggatagatatttgccaacggttcatctagtaaaaaacattgcgcgccagtttttaaaacagcagaatataactttactaactgtatttcacctgttgatagttcatttatctttctatctaaaatcttttcaattctaaattgtggcgaatcaaaaacttttgcaaaatacttgcttttataaacctgacttttatcagaatatgatcctaaatagtccctcactgaacaattaggaagtggtatatcttgaaataaacaacttatatttgattctctcagttttcttttattaattaaatcagcatctataccatttatggttatttttccttcctttttcggcgtgtataggccaattattgttctgagcaaagtagattttccaattccatttctgcccctcacaatataaaatcctggagtaacaaaattggcagaaaaatttgaggtgaataagggggttttttcatctaaataaatattaaaatcctgtacttgaatcaaatttattttagaaattatttttttaccatcttgttcattcttcatggttagtaaattgttgattctcatccacgctactttaaacgattcaaatttaaataagatagaaaaaatttcatcaacctgtcccaaaagttgattaaaatattgaaaaataattgaaaaggaaccgattgtcatcttgccggaaatcactgataaaccgccattaataaacaatactaattgaaaaataagttgcaaaacaatctcgctattagacatatgtcaactaccctagactgaagtctagggcttagtggctcgttagcttgcgctaaccagaacaccaacttgcttagatacggacttgacttaccagcaatagtcttttgactattgccgatagaggtcgtctaattaccaaagccttttgagtccgcgagttgctaacggactacagcctttctaggctgctttttttattttaggattctgccacttgcctaatcctttttctaagatgttcactgccgcattccaatcacgaatatggtgcgttcaacagattggacaagtccattcccgatctttaagcgttagtttcttataaccgttttgtcccataatactgccacaagcatgacagcgttgagtagtatatttaggatcaattgttagaaattctttgtcatatagatctgccttataagccagcatgttcaggaagctgcgccaaccaacatcagaaatagcttgagataaggcatgattctttaacaggtttctgcttcttagttcctcggtaactactaaatcgtggtttttgattagtgcagttgagagtacttgtaaaaagtcactacgctgtcttctaatcttgtcgtgcagtttagcaactattagacgctgtttttgatagttttttgctagccgcaaattgcgtccttcttttttagcccggcgctgccggcgagacaagacacgttgagcgtgagccagtttcttttgggttttgcggtaaaagcgtggattagcgaccattgatccgttagatgctgtcaagaaattatcaaggttgagatctattccaatttgactctgcgtcttaggcaaggctttaacaaaggcaatatcgctgcctaactgcattgataagtagaactgctcgtcagcggtctttttaatcgtgactgttccaatacgagttggaatatgattaagcaagcgctctttgattagttttctaaagccggcaatgcggacaattcccagcttaggcagtttaacgtgctgagcatcaataaacctagctgtcccgttatcaagaaaagcttctttttgcttaggatattgacagttggtctgatatgaccagtcgctgcgttttttatggaaagttgggattccatgaccaatcttacgatagttgttccaagctttctgatagttttgaatcgcattggcaagagcgagactatcaatttctttaacacgtaaaaagctataagcatcgcggatattcttaggcttagctaataacgagttattaatgactacttcttctgccagcttagtctcataattattaagaatagaaaagacaaaaggcattgcttgatattgtctaacagctaaatagtgcttagcatgataattgcttcgattgcgtcctacataagagttgtatacaaagcgttgcgcatcatagtttagtttaatgattttcttttgcttagaactaggataaaagcgaagcttaacgccaaagtgataggctaaactgctcattcttttcatgtgtttcacctccttctgtagattagatatttatattttacaggaaagccgaacatatgtctctatttttttgaataaaaaaagctgactgctaggtcagcttggccctatccatccccgcattaagatacggggatttccgggcattttcattaaattgagaagaaaatctcgcttagcaacgcctaaaagcgttcttttagtattgctccatctctcagtttcgattttctctcttcgattaccttttatttcaatatatctgcttaaccattcagtaaaaccagaaaagtactcattataagcttctttcaattttaaactaacttcaaaaatcttagatcgcaaaaataaatatatgagactatatgcaggtaacaggatcgctattaacaataaaaaaccagacccagccataaataaatatgtaaaaatcaaaattgaagaaagggcgattgaaataatttgatttattgtttggaataaaaaagtcaacacttcagtagtatcttcagtaattttatctgctgtttgaaccgaattcatctttgtaactgctagcgtatccttcacatacagttctttcattattacatcattaacttccatgtttatttctctaaatcttaaaatctgaattttgttcataaaatatgacaacaaaagtctgataagacttaaagtcgttattaatacaatactacgtacaaaagcagccctatcagccttatatactaaggaatttaacagtattccttctaagtaaacattaaaagtcaaaatgccagtactgataatattcattcctaatagaagccaatattcaattttatactttttatcaattttgctaaaaatcgtatgcatagtgtcacctaactctgactagcagtcaaaaatgttaaaatataatgaatataaaattagataaattttatattcttatttatcctatgtcaatactaaataaattgatttggttttactttcatgctgtatttgatattatgtagttactaactaccaaataactatctatcaactacagaaagagaaaaatatgactgaaaaagcagcaattaacatccgtgttaataaagaaactaagcaaaacgcagagaaagtattaaacaaactaggcatcccgatgtcagtcgcaattgatatgtacttacgacaaattgcattgactgacggcattccctttgatctatcttccaagaaaagaaaaaagaaaaatgatcacgaaacagcaatgatggtcgcagaagctacagctcaatatgaaatcgttaaatccaactgggaggataaattagctgagtttattcctgactggatgaacatgaataagatgactaaagaggagcttgaagcaaggttagctaagcatgcccaagatgcaagagatggtaaaagtgtcgagattagcaaaacttttagcgacctgaataaagaattaggaatttaaatttcatacaagaatatactgtcaaatcaagtcctaacgtatctgtagaacttaaagagatatatagctctatcttgcaattatctcgatctccaaaaactgctcgagattatgtaaaagatcttgaacaaactatgcaagcgttaaattattttccagaaagatatagaaaaactccttcaggaaaataccgacgagttaatttcaaaaaatacgctatattctactttatcgaaaacgatactgtacacattattgatgtcatactagcttcatcaagtacagtattcaaatattaatcctttgccccattctagctattaagctatactagacagaagaaattaaacaaattaagggacaataaaatgagcgataaattaattaaaattgcatacctctacgaagatttaatgaatacttacggtgactcaggcgatgttaaaatcttgagctttttgctaaagcgtgaaggctacgacactcaagtcgacaatatttcacttggcgatgacttcaatgcctttgactatgatttcgtcttcttcggcggtggtcaagactttgaacaaaccgttgtagccaaggatttaccacggcacaaagaaacacttgataaatacatcaacgatgacaaacctatgctctgcatttgtggtggttaccaactaatgggtagttactataagaccaactcaggtgtaacaattcctggcttagacattttgccacttcacactgtcttcaagagcgacaagcgaatgattggtgatacccgttacatgaccgaatggggcgaagttaaggcttttgaaaaccactctggtcaaacttacttcgacaacaaggacaagttgcatcccctcggcgacatgatcgaaggctacggcaacaacccacaagaccacgtcgaaggcctgcgctatcgcaactttattggttcatactcacatggtccactacttaaaaatactaatgtagctaatgccatcatgaaaatgattatcgcttggcaccaagaacgtgttagcgaagccgaaaaagtcacagaataaaaaagacccagtcagaatctctgactgggatttttcattatcaaattaatttaaaacacgtttagcagctgagggataaaagtaggcactgatagcctgctttctcaccccttgactaggagttgcagcgtgaacatattgtccatcaccaacataaataccaacatggtaaggagctgaggcagaaccccagaacaacaagtcgccttttttaagatgacttaatgatacgcgtttacctttagtaacttgaccataggtggttctaggtagtgtctttttagcagcctttttataaacgtattgagctaagcctgaacagtcaaaggctgaaggaccagtagccccataaacgtaactcttaccaacttgttctttagcaagttggactacggcgttacgtttttctgttttgctttgactagctgcttggacagtttgcgtttgaagtggaacattaatgaatgaaattcctgtaaaaaatactgacaaaactgtggcaaacttaactaaactacgtttaaaactcaatttatttctccttaacacttcttatctttcaatgttttctatattaccggagaaatattacagccttgttttaaaatgactactataaaattaagcaatgtaacaaaatctgctatttcttgtaaattttgcttaacttgaaaaacactataattttctatatgcttaatacattaatttaggagttttttattatgaataagatagatagttatgtacgccactttttaatactaatcgcactaattttagggctttcactcgtctcagaactgcgtgaaattattgcctatgactcatctacccttggtatcatctttttaactgctgcaattatttgtacttttgcttcaggaatcacattacaatttcataaactaaattggattacgatcattttaattctgattctttctacgattatgatcttattctggctcaaaacccacacttttggccttattgtcagcatttttatgatttacaatattattgtatttctggtttgtgctattaacctaatttttcaaaatgatgctgaatgattaaatcatatgcttaatcataggtaatacaatcccaattaccactaatccaccattaaacaaaaaacttattaatttcttttcaaaaaagtatttcttcataaaaaaagacctttctattatgaataatcaaatcttcgggctaaaattccgacaattacgaaaacaacaacatatcactttagccaaagcagcagctggtataacttcaagacagtctctaggtaactgggagactggcaaaggcgaattagcatttgagaaagttttactgctactaaaaaaaatcaacgtccagccaatagactttttagagagtagtataagtagttacctcaaacaaactacttcacaaatctctgcagcttatgttaacaaccaagttgataaattattgcattatgctaataagtatcttgacataagccatcgtaatcttacagacagagttagctttttacgagctgctgtggcatgcaattattacatggacctaacgagtatagatctaacaactagttctgataaactacggatcatctcccattttaataaaatcttgaatggagaagaaatctggaattttgaggatatttattttttaggaaatacacaaaatctgatgagtccacgtgacatttatagtttagcctattctttaaattattatcgtcaaaagcacaaaaacgataatagagaatggatcaatgccgtttataatactttgataaacgctgaatttgtacttataaaaacaaatattaaattggctactgatttagacttacttttaagacaaaagtgggatttaccagataattatgctttcgaaaaaattcgacaaaattttatgcatgaactgctaaaatatatttcaacccaagatgaaagtgcaataactcagcaacttcacattcttgaattagaacacctatctgatttaaaaactggttttgaaacagcatatgaacaagtaaataaaatatattttcaataaactctcctcctagttagtaatattatcttatttctaatattgttagcgctttttgccaatattttagcatttttctttttacaaatattagccatgatattttatattcgtaaactaattaagattttttgaggaggatataaagatgaaaaaatcaattaaattagttaatgtactttctgttagtgtactgactttaggacttgtagcacctgtaaccacagtttctgctgatactgctaattctgagaatatcgcagtaaaaacaaacaatgaatcaacacaaagtacagatacatctggcttagaaatctatgatcaatacgttcaagtaaatcctgaaaaaaatcaattcgaattatccaaattaggtgaaaaggttttaccaactactgtatcatcacagattcagagtcaattaaatgctaccaataaagaaattaaggctaataattttattattgaccctgaaaccaaagcaattgtaaaatactcaccttatattaactttgctgctagcgttagtggcgctgcgcgcttaagaagcggatgttatgttcgatggttctggtggggctttagattctactttacttcaaatgcagcagtaacttggtttagagggattttaggtggcgcttctagtggagccaccataggaaacttagtagctgctgcaacgggccatgctatggctgcaactacaatagaagcatttggtatgtacgctgatagtatgtctagagatttgtatgattataataaaaaacaccgtcgtagtaaagtatatatggatctgaatggtgtatttcaatattcatttcatacattctaaaacatttggagaaataacatggggattaaaactttagtatccgtcattttaatcattatagtcattgtactagcctgctcaccattttataaaaaatatcaattattctatttaaacaaagtaggctattgggatatcctaatccaattcctagtaattgcaggtatcaacttcttcatcggtttaaaatatggtctgggtgccctgtttttattgattgttcccgttccactagacattattttcttaatctcaatgatttattcttaccttaaaattagaaaaatgaaacgcaaatagctcttaaaaaacgaagcaaattattgcttcgttttttgattgatcttatttttcttctgtttcggcgttagattcaaagccatcgcagccacgacaaccaacactgatccgacccaatccatcggcatcattactaacccaaagaaaaggacagaaccaactgtagctgaaaatggttcaaaagcatctaataaacttacagttgatggaattacataccgcagcgcgtttgccataatttgaaatggaataatcgttccaattacaataactgccgcagtatacagccaaacttcaggcttattgggaactgcatgaaattgcggatcaattatcaacaaactgattccagcaaaaatcatcccccaacctgttactaccatactagaaacctttttaacaatgttaaccggaatcaaagtataagcagcctcaccaaaagcagacaaaacgccccaaaacagtgcaactggcgtaatggccaaatgattaaattgcccatgcgttgacaataaaaacactcctaaaaaagcacataacgccgctatgatatccaatctacgcataacttgcttgtgcgtgatagctaaatatcccaatacaaaaaatggcccaataaattgcaagattgtcgcaatcgaagcattagccacttgaatacacataaaataaaatagctgcactggcaataatccaaatatgccataggctataataaccaaaacattgtgcttatttttcaacgtagctattggtttttgctttaaaaatcctgaggcaattaataaaactgctcctgaaataatcaaccgaatttgtgttaaccacattggtgtaatcttcggactaatatcaaacaatcctttagcgaataatcctgacacaccccacattacagctgccattgctgctagaaatgtccacaatcttcgtgtttttgctggtaccatctcgttcacctttttctttctcattcacctaataattaaaccacaaaaataaggatacctactgggcatcctcaactttattgatgagtttttttaactttctttttcttaggtgaaatattcaaggccatagctgccagcacaactaaaatcgaaccaatccagtccattggggtcatcaccaaaccaaagcaaataactgaaccaacggttgcagaaaaaggctcaaaagcatctagcaaacttgccgttgatgccttgataaagcgcagcgaattagtcatcaattggaatggaatcagggttccaatcacaatcactgccaccacatctagccatatatgtggcgtattcggaatatgcggcatctgtgggtgcacaatcattaggcaaattcccgctgacagcaatccccaacctgtaacgactaaactagaaactcgcttcaacacactgattggaattaatgtattggtcgcaactccaacagctgaaagcaaaccccagaatagaacgctaggcgttaaagcaaagtgattaaaacgcccatgtgtcgccagcaatactacgccaataaaggcacagatggcagcaagcacatctattcgccgcattacttgcttatgcgttacagctaggtagcccattacaaaaaagggaccaacaaattgtaaaatcgtggcaatcgaagcattagcttgttgtactacaataaagtaaaacaattggactggtaataaaccaaaaatcccatatgcgataatcgtccacgcgtcatgcttatttttcattgtagcgattggcttttgctttaatacggcagctacaattaacaaaataatgcctgaagttaccattctaatctgtgatagccacattggtgtaatctcaggactagtattaaatagactcttagcaaatagacctgatattccccacattacgcaagctaatccagctaaaaaggcccacaggcgccgttgtttttgtgtaaccattctttttaatccccaacttttctaaaactaacatactctatcataacaaaaacgggctagcttgaactagtccgttaattttttattcatcgtttttcttaattgggtttctgctaggcattagctgcatgaatgtagcaacaataattaaaaagccaccaagcatgtccattgggccaaagtccgcatgaagcagtgaaactgacaggatcgttgcaatcagtggctcgagggctccaagcatccctaccgtacttggttcaatatactgcacactagataagtacattgtataagctaacaatgttccaccaataataatataaacaattacccaaacatcaactggtgcaagttttggcattggttgagtgaagtaaattggtaaaaaggcaatgcctgcaaccaacattgctgcgccgattactggaatcggcccatactttttgaataatttcccaggtaatactgtattaatcgcttcagaaaaagccgcaattaagccccagaaacaagcaagcggtgataaagcaagttgatcgaatctgccacctgtagcccagatgaaggttcccacaactgctaccacaattgaaatcgcatcaattcttcgtggccacatcttacttctcaatgaagaatatataattatgaaaactggcgctaaaaattgaatcaccgtcgctgtcggagcattgctgtacttgactgctacaaagtacgataattgtgagctccccattcctaagaaagcaaaaatgatcaacataatgattacttttttatcatgtagcattgccttgacttggtccaagtatttccaacaagcataaatcataagcagggcgcctgaaaaaagcaaacgcagacctacaagccaagcagtatttacattagtgctagaaaataaaaattcaaccgccgtacccgatgcaccccaaaaacaggcaccgacaacagctaaagtcaatcctttataacgctgattcacattcacacatcctttagattaatgtttttcattgtaacatgggctaaaggaaaagttcaatgcttctaaagttgatttaatctatataacgtataacctgacacgctagccaataagccgattgtaaaaagcaaccaagattctggatgaaaggcaattaaaacaagtgaaagaaagcctgctgctaaactagaattgcgttccattcgctttttgccaaaaagcagaccgcacataatgccaaacatagttagcacataaaatgagtcaactaacagtaacaaattctcaataattgctagatcacttggctttacttttacactcaaatcagtaaaaatctgagcacagccaaaaaataccatcacaaatgcagctaagatcgtgataaagctaatcgtacgaaaaactgacttcaccttttgagttggcgtttcatcgataaaggtttttaagaaaaactcgtgatctttttttgctactacagctctgcccgtcttcttgtcataccagttcaatagaccagaaccaattagcataatagcaatcacagcaaactggatgacaattaaacgcatgaaaattggaaaggcatagattaccgtcaataacaaaattactatatagatcagctctgcataaagaaagaaatgcagacgctgtttatttttgaaaatagtttggaatgtttttgaattaggatcttgcataagacttctccccactaaatcttattacgaaaactcaaccagaaatttgccccactgagaatcaagccaataacagtggctacttgcatgcttggctgcatgaaaagcaagatcagtgataaaacaacagttaaaacgctagacgcacgaattaatttacgatttccacctaaaataccgacctccacacaaaagagtaaaacaacatataggccatcaccaatcagccaaacattttcaaagagattggcaaaattaccggtaagcggcttagccaaaatgtcagtccaaagctgacgtgcaaaagcaatacttaaaccgatatttgcccaaaagagcaagaattcaaataagcgaagaaatacgtttttagtaaatctaatactagtcagtgtttcccagaatgtatcgtgttttttaatcactatccttcgatcaagaaaggcaccaattgaataataaatcagaattgcaatcccttgaaatgcaatcaaatgcataaaaactttaaagtcaaacatcaatgtgaatagtaaaactactacataagctaactcaaaatataatacacagcgactaaactttcgctcgctaagccagtgcttcaattctcttttattcatatgatcactaatattgccattcatattttcactctcttttaataattatctaattatgtaaaaattgtataatgatttcaaaattttgtctagtccttttataattgatttagtaaatatttttcgaggtaaattatgaattatcccattttaattactattttgatcttcttgctgtgctttggccgattcatttggatcattactcacgaacgtcgttccttacgcgctggagttagcttagttatcaccttatttagttttttatttttaggtgtagtcattctggttaatatcgctgaccttgatccacattacaaagactggattttgccattatttgtgattgcgctatttgctgtgatggctggaacgattatctttgcattaactttgatcattatgtttttctacgatggcattaaaatcattatcaaagaaggaaaccgctggacaaattatctttctctgggcatggggatttccattatcttcttcctatttttatatcctcttgtgggacgaattagtcatgatagctggttaaagtatccttatatttttctatggctagtcatcatctacttagtcactatcatgatgatgtatactttaacttcttggattaatttaattaattggcacatgccgcacttagactacatcgtagtgttaggcgctggcattatgggaacaaaggtaacaccacttctggcagcaagaatttcccggggaatagaaatttatcacaaaaatcctggctctaagttaatcatgtctggtggccaaggacctggtgaagacattcctgaagcagttgctatggctgaatatgctgaaaaactgggtattaataaaaacgatattattatcgaaaataaatccaaaactacccagcagaacttgcaattctcacatgcactgatgaaaccaaatagtcgcttctgtattgtaaccagctcctaccacgtgtatcgcgctctggttttagctaaacgtcaaggactcaagtgtactggttatggtgccaaaactaagtggtattttactttaaatgcttttgtgcgtgaattcattgcatatctggtaattactaagaaaatgcaattgactatcatcggttttctagcagctatcatgattgctgctgccgcatttcatttttaatttattgcgttaagttgagaaacttagcgttttttattgatttatcttttaatttttttataattatagtcaaatctatagaaagcaaggtgtaactatgaggattcgtaaaaacaacttgtcaaactgtcattagtcaggatgacgagtcctgactttttcaaaaaagcaggttacttatgtcagaaacaaaattcaataaaactcttcttagtgtcagtcatgtggatttttcctaccctaagcgcaatttattcaccgatctaaatttttctattgctaatggtgaacgtgttgctctagttgggcctaatggaattggtaaatctacactaattgacctaattcgtaagcaaatccaaccagatgatggacagattatttgtcacggtgaaattaattatgtacctcaagtcaatgatcaaactgtaattaatgactcaaagagcgctggtgaaaagcgattagctttaattgaaaatactatttggcttcctagttctcttctcttattggacgagccgacagtttacttagatgacacaaatatccagaatttactctacttactcaagaattatgatggagcaattctagtagctagccatgatctggattttatcaaccaactatgtgagagaactattattctgcagccaaataatgcagtttattacccaggaaattacgcacagtatctcgaacaaaaacaattagataaacaagccgtatacaattttaacgaaaagcgagatatattaaagcaacaaattactgaaaaagtctctactttaaagcaaaaaagtactgactataatcattttgctaaaacacaagacaatactggtcgctatccttcgcgaagccatgatcatgtccaaaaaggattaaatagtcggcttaagcgagctgaacgtgaactggctaaacttccagagaaacagcacctatatcaacatcaacttaaacttcctgaatttaaaaagtggccgactaaaatacataattactctatcaaaatagatcaattactcagtccccaaaataagactttattatctaatacacagttaaacttgcaaacagccgatattattggattaatcggccccaacggctgcggtaaaacaacattgctcaaatatttagaacactacattaatcagcagcaatctttgccaccagccagctacattggtttaaatacgactaaacaaaagaaacctgccacagtagcagatttctttcacgagactattttgagcaaaactgaagttaagcgtcttttagttaaaatggatatgtttgtcgatttgactacaagactcacggatttgagtggtggcgaatttgctaaattagcattaatcaagcagctataccttgaacaagaatctattctattacttgatgagccgactaactatcttgatccagaaagtgtgacggccttggcccaaatgctaaaacagtcgcatctcacttgtattattgcatcccacaattgcaaatttttaacccaattttgccaacaaatctataaaattaagcagcaaagactaattgaattgcactaaagcatttctcttaaacacatatttgctaagcatatcctttactatcctcatctatattaatgaagatcacatttggtgctgcagaagtttggtgcgtttctttattatatttaccaccataatactcataacgaggtttccccttgccaaaaggatctattcggcaaagaaagatcacatatgtcgctttgaattctttttccggagagccacctagcccgccatagattatttcttcctgataagcgttggcaacttccagaatgttttctcctggttcttgcgaccctacttgaatgattaacccgtatttattgcgcctcttgtctcgcgcaattacatgtacgattgctttttcatctaagacatttctatttggatcatcaagtgattttgcttcctgaatattgagttcgggaagcattctttgtactgctgtaagaagctgctcattatacttcttcataattcctgcggccatgtgatccaccattgccggtgacatttcattttctaacataaaaaaatcctcatttctaaaaatctgagagttttatccctctattacttattacgcaaaaaaacgcaaaaattttttcggaaatgaagttttttcaattttttagttttcttttctaaaaaatggactgagtagcgatacaagcaggccgtaaataaaataccagcgataaatatctgccaagtcttgattttgaatccacaaaattattgcaattactgtcagtaagccacctaaaaagattgttgaacccatatttttatcagtaaagaagctgatagcagcacctaaggtaattaacgctaccaaactataaatgacgataatcactggtcctttagtctgaacgttaacatcaagcattggtgcgttagtaaacagctgccacacgataaaaccagctaatgcaatgccacatagcaatactagtaatctaaaaacaaaagttaaagtctttttcattatttttctcctgtatgcataataatactagtataacagcaatatcgcggcatacgaaaaacgcttggatttttccaaacgcttttttactattcttttgcttgcataaattgttttctagtgatgtatttgattgatttaacgtattgccccttgtgttgaattgaaatatattggcctgatggatcgtagccgccaacctttttcaacaataaattctttttcgtcttaggattatacgccttcacattgtaataccgctgtgtgcctttatctacttgagcatagcttgtttcctgggaaatgaatggattcaatctatcagtaaaagagttatgaaatgaaaaaatgcagattactcccactactagcactagtgccgttacaaatgcggttttaatagtacttttattcataatattcaccttcatcgttcaactattgttatactaaaatagtacaccaattcagttactttaacaattgtttctagcaaaaaaacgcttgaaaaattccaagcgtctttcacctaagccaaaaatctttttatagcttcttctacactagcattcaatgattggtgcttcgttgcagcataattagccaatttttcatgtaatgaaggatcaatgcgcacattaaaattacctttaaaaggtttctctggtataactccatcttccttacagctcattagataatcatcaatggctccttgaaaatccttctccaattcatctattgtattaccttcgtaagaaataagactcttaatcccctgaaccttaccaaaaagaatcttatcctccaaagtatattcaatttaaccttcataacctttatacttcatatattgattagtttttttcatctttattcatctctttgattttatcttgaatttgtttgatttgatatggtaatagttcttttctaggatgtggtttatgaagaatgatccgatcactgccctttttaaaaataattctagatccactcgtttttcctttattatcgagttgataatctagttcatgcaatagtgttttagcatctttaaagtcaaacgttctgagactgtaaaatagtttgtgtaaggatgaatgattccttaaatttatttctttaaacattagaaaaaggagttcctttctcgtatgattggtttgaacaaaaaaaacacatacagaaagaagaactccttcatgaatgattttaccaaagattttgctcaagctctattcaatccagacaaaataaatgatttattgcgcaaagaactacaacaggctgttaataacttgctagaagctgaattgactgcctttctgggctatgatccctatgccagaaatggctggaatactggcaactctagaaatggtgcttatttccgcaaagttgatacgcaatttggcccaattgaagtgcaagtgcctcgggatcgcaacggtcaatttcatcagcacacgctgcctgactacaagcagcactcggatatcttggaaagcatgattatcaagctttactccaagggcgtgaccaccagggaaatagccgatctaattgaaaagatgtatggcagccattacagtccagctcaggtatcaaatatttccaagcagatgattccaaaggttgaggcttaccacaaacgcaagctaagcgacaagtttttctgcgtctatttggatgcgacataccttcctttgcgccgagaaacatttgagcgtgaagcagtctatattgccattggcatcaagcctaatgggcacaaggaggtcattgactactgcattgcgcctagcgagaacattgaagtctggacagatatgcttcaaaacatgaaatcccgaggcttaaagcaagttgagctttttctttctgatggtgttgttggcatgaaaacagccttagctcagacttatccaaaagctcattttcaacgctgtttggttcatgtcatgcgcaatatctgcgctaaagtacgcgtcgacgatcgtgaaaagatcatgaacgaattcaaacaggtgcatcaacagacaaacaaagaagaagccacagctgtcctgcatgacttctataccaaatggggcaaggtttacagccatgttatcagaagcttgaaagacatagaaccagatctgctggtcttttataactatcccaagcagatcagagcttcaatttattcgactaacatgattgaatcatttaacaatgtgatcaagcgcaaagctaagcctaaggcagagtttccaactgaacagtcgcttgatgcatttattggcatccaggcaatgagctacaatgaccgttatttcaatcgaattcataaaggctttggtcaggttcaggacaccttagaatcctactttgattaaataaataattaaaaaatcaatttacgagaaagaactatttacacaaaagatttgacagtttcaacgttcttggatgactatataactttattaatagcttttctaatttactcacgttatcctcacttaagtatataatataatatatcatttgtaactaaatttgcaactaagacaaattatacctaattcgctaaattcacgctactaaaaaagcgcttggaaaattccaaacgcttcttttgtttaatcatctagacctaacttcttaaagatatcatcaacatgacgcaaatgatagtgataatcaaatgcatcatcaatatcttccttggataggtaattcataatttcactgttttcaaccaatggcttaaactgcttttgctcattccatgatttagcagttagcttctgtaccatatcataagctttttcacgagatagacctgcttcatcgatcaacttaagcaacactcgttgagagtaaattaatccatatgtacgatccatattcttaagcatcgtttcagggaatacatctaagttagtcaaaattcgattgaagcggtgcaacatatagtcgacgccaatagtcgtatcaggcaagataactcgttcggcacttgaatgagaaatatcacgttcatgccataacgctacatcctcgtatgctgtaacgacatgtccacgcattactcgagccattccacagaggttttcagatccgatcgggttacgtttgtgtggcattgcagatgatcccttttggccagcgcggaaatgttcctcaacttcatgaatttcactgcgctgcaagccacgaatttctgtcgcccaattttcaatactagtagcaatcaatgctaatgtcgcaatgtattctgcatgcaaatcacgaggcaatacttgactagtaattggctgttgtgtcaaacctaattgcttcattacgctagtttcaactgcaggtggaacattagcaaaagtaccaacagcacccgaaattttgccagattcaacgccttttgcggcatgttcaaatcgttcaatatcacgattaatttctgcgtaccagcgagcaatcttgagaccaaatgtagttggttcagcctgaacgccatgtgtacgtcccatttctactgtgtacttatactttttagccttttctgcaatagttgcttttaattcgtgcagatcttttctgataatctcatcagcttgtttaagtaagtagccttgagcagtatcaaccacatcagttgaagtcaaaccaaagtgcacccattttttctcagggccaaggctttcagacacagttctagtaaaagcaaccacgtcatggtgggttacttgctcaagctcagccacacgctctgcagtaaagctggcattcttagcaatcttctccgcatctgcttctggcacttcaccgagttctgcccaagcctttgttgcggcaatttctacttcaagccaagctgcatatttattttcgtctgtccaaattttccccatttctgggcgagcataacgttcaagcataaattacatttcccatggattcttcaaaacaatagtttgttcacgatctggaccaactgaaacagttaccaaaggaacgccaaccaactctgaaacgcggttcaagaatttcttagcattttctggaagagcgtcccaagtcttaacttgagtaatatcttcatcccaagctggaagttcttcatatacaggcttacatctgtataattccttcaaacttgctggataataatcaatcttttcaccatcaagttcatatgcagtacaaatcttgatcttgtcaaaacctgaaaatacatcaagcaagttcaagctaaggccattgataccagcaacacgctttgagtgacgcaatgcaacggagtcaaaccaaccaacacgacgtggacgaccagtaacagtaccatattcatgagcagtttcacgaatacggtcaccaacttcatcaagcaattcagttgggaaaggacctgcaccaacacgagtagtgtaagccttgcagacaccaattacagtatcaagacgattagcacctataccaatacctgaacaaataccaccagaaatagtattagatgaggttacaaatggataagtaccttcatcaatatcaagcatcacaccttgcgcaccttcaaataaaactttcttattttggtcaagtgcatcattcactaagacagaagtatcagttacatacttcttcattctttgaccatattcatagtatttatcaaaaatgtcttcaaatttaagtgctggcttaccataaaccttagtaaataattcattctttacttcaaggttagcacgcaatttttcttcaaaggtgtctttttcaagcaaatcacaaacgcggattccaattcttgaagccttgtccatgtaagttggtccaataccattcttagtagtaccaatcttgttagcccccttagcttcttcttgatattcatcttgcttaatatcataaggcataatgatgtgggcacgattagaaattctcaagccactagtatcaatgccactcttttcaagattttctaattcgccaaacattacttctggattgattacgacaccattaccaataactgtattgtccttggctgcaaaaataccagaaggaattaaacgcatcttgaaagtttgaccattaatatcaatagtatgacctgcgttgttaccaccatttgaacgaactgcaactgcagcatccttactcaaaaagtcagtaatctttcccttaccttcatcgccccattggcttcctacgactgcgactgctgtcatttaaaattcacctcataaaaatctctataaatattacgtatgctagtctagcaattaatttacaaataatcaatataaaatccgaattattttatttttaaattatttcatagttcgatttttatattgacaaacacaaattattcccatatagtatgtctcggtcaacaaacaagattaaagggagcagttttaaaatgagtaactactttagtatggaagcctttgactatgatgatatccaacttgtacctaataagggtattatcaaaagccgtcgtgatgcagataccagtgtcaaattcggaaaccgaacatttaaaataccggttgttcctgccaatatggaaagtgtcattgatgataaccttgctatttggctagcccaaaacgattattattacgtaatgcatcgttttgaacccgaaaagaggatttccttcatcaaaatgatgcatcaaaaaggattattcgcatctatttcagttggcattaaagacagtgaatatgattttattgatgaattagtcaaggaaaaccttaaaccagaatatattactattgatgtagctcatggtcactccgtttacgtgattaagatgatcaagtatattaaggaaaaattacctgattcatttttaacagcgggcaatattgctacgccagaagccgtacgtgaactcgaaaatgcaggcgccgatgcaaccaaagttggtgtgggacctggtaaagcatgtattaccaaattgaagactggctttggtactggtggttggcaattagccgcattaagaatgtgcagtaaatctgcttctaagccattaattgccgacggtgggattcgtcataacggcgatatcgctaagtcaattcgttttggcgctaccatggttatgattggttcaatgctggccggtcatgaagaatcacctggtaatgtaatcaaaattaatggtaaaacttacaagcaatactggggctcagcctctgaggttcaaaaaggtgcttacaaaaatgtagaaggtaagcaaatgttagtgccataccgtggctcaattaaggatactttaaaagaaatgaaggaagacttgcagtcatccatctcatacgctggtggtcgcgatcttaattccattaagttagtcgactacgtaatcgttaaagacaatatttttgatggtgataagtaattttaataaaatttttgcatttttattattttcctgttaagaatattacgataatatagtattatctatcttttttcgatagaataatataagtcgagttattgtagggtagtcaataactcggctttttttgattattttttaaaaacgattggacagagttttaaattgtgttatactagttgtcgttgatgaatgcgcccttagcgcaactggatagagtgtctgactacgaatcagaaggttgaaggttcaaatccttcagggcgcacttaaaaacgggaaatggctcagtttggtagagcacctggtttgggaccagggggtcgcaggttcgaatcctgttttcccgataagttagccgcacttcattgaagtgcggtttttttgtgtaaaaaaataagtattccctcggaaatacttatcatgctatgcccctttagtagctcgtctaaagataatctgtgtatctgaatctacatatttcaataacggtaaatcgtaatccttaacctgggccaaaacatttactttctcattgcatggcaaatcgcgtttagtaatctcgatttcgccttcataacgcggatacaaatgattatcaatcgtcacgctgccagttggtctagcataaatattatcttgcggctctgttgacaaaaacatcttttttctgctttcctttaagcgaactacgtcacgcgccacatctggacgattatgccaatcattaccaaacaattctggtatatcagtatctaaatgcagtgtaattgcaccctgtttttgataattagtaatcgattcaattgcatccctcgtaagttgcggatctcccacaaaaatgtgatcgcaatcataatctttcaattctaagatcgcagctaatgggttttcatatcgctgcttctccaacgttggcaatcctgcaaaaattggtccacgcaatttgccatttcctgaaataaaggctgctgttttcaaaccatattgcttaagccactcattcttcttttgcatccagtgtgcatcaagacctgtttcaggacgtgggtagaagttatgtcctgctgttaatttttcaaaatttgcattgctataacgcagatcatcaatattttgttgcgtaataatgctggcatttagaactatcggcatttctttggacaacttggcaataatatcagtagaaaatccatgatctactctaagaccagttagactcaaacttttaatttgctcaacactattgacattaatacccaaatcttgcagatcatctgccgtgacatctgcaataattttcaagtctagtttttgacaccaattagttaagtccgccagccgatttaaaatcgtctcactatcagtatcaggtacagctagctgagtaaaaacgcaggtaaatccactattgcgcatcgtcagcaaataattgtaattctcggacgtcaaatcgtgtcctagataaacagaaaatcctaacattcttattcctctaaaattaattaatttcttttattatctatagcttaaacgctttcttaaatatcttactacattttttgcttgcttttttctaaaaaataatgttaaatacatataaacaaattaaaaagcgatgaaaaagacgagtaaataatctaattctttccagtgaattagtgctagtgtgaaactaatagaccctggattattgaaaaacacttttagcagctcactgaaacaataattcttagagtaggttgagacgtctccggtacgttaccacgccggtggagcatgatagtgcttcatgagtcggtctattaaaatatagacaatgtgggtggtaccgcggaaaaaagcctttcgtccctgtttttttagggagcgaagggctttttctttgctctaagtacattagaaagaggacttatattatgacacttattttacctaaagattatcacccaacattaactgtgcgcgacactgaagctgcgattgtatttattcgtgaaaccttccaagataaattggcagaaattctcggtttacaaagaatgtcagctccaatgtttgtcgaaaaaaagaccggcttaaacgacaacttaaatggtgttgagcgtcctgttgcctttgacatgaaggcaatgcctaaagaagatactatcgaagtagttcactcattggctaaatggaagagattggctttgaaacgctatggtttcggaatgcatgaaggactttacaccaacatgaacgccatccgccgggacgaagatcttgataacttccactccatctatgttgaccaatgggactgggaaaagattattagtaaacaagaacgcaacaccgacacacttgaagttactgtgatgaacatttttaaggcaattaaggcaactgaaaagctggttgctgcacgctacccaggctctacttatcgcctagctgatcacgtttcatttattactactcaagaattagaagatcgctggcctgatctttctccagaagagcgtgaagataagattgctaaagaagaaaaagccgtctttattatgaaaattggtgacaagttaaagcgtagtggtgaaccacacgatggccgtgcaccagactacgatgattggcaattaaacggtgacttagtcttctggtatgaaccgcttaacagtaagattgaaatctcttcaatggggatccgtgttagcgaagaaagtttgcgtgaacaattgaaaaaagctcactgtgaagaacgtgagaaattaccattccaccaaatgcttttgaagggtgaattaccttattcaatcggcggcggaatcggtcaatctcgtctctgtatgttgctgttaggtaaggctcacattggtgaagtacaagcttctatttggccagaagatatggttgaggcttgtgaagctgacgatattaagttgctgtaattttaagatttttttacataccaaaaaagatcctgcaaaatgtaggatcttttttctattgattttatttccgttctcttctagaaatccaagccataatcaatggcaacaatacaaagccaaagaccatcatcgcaatggcataccagttaacaccgataacttgccctgctgcgtttactacaccaaattgtgccttccagttatattcaactaacaagaagatcacaatcacaccagataaaattggcacaataacatcagtcataacgctcttattagcctttaagatatcttcttttgccttaccacggtaaaattgaataactgctagaggtaccacgatgaaacctaagaatctaaccatcgcgctcaaagtaatcaagttgaccatattgtattcaaaggccatcggaatcaaaattgccaagccaacagagataaagaaagttctaattgggaagttattcttagttctcttagttaaagcttgtgacatctgaccctcacgagccatagcttccagaatacgtggagcattaaagctggaagctacgttgatcccaaacattgaaaccaaggcaccaaccaagattacatcacgtaagatttcattattaaaaatagccgcaatcgctacaacttgcttagttgtcattaaagcacgtggattaagtaccatcgctaccgctacaacgccgatatagacaaccgcaataattaagattgccaatggaattgctcgtggcaagttcttttcagggttcttcatatcttctgaaccagaagctactgattcaaagccggtaaaggcatagaaggctgaaacaattgacatgacaaaggtagttgtagttaaagttggcacaattttctgaccattctgagtcaattgatctacttgccctaggttgcttgatgcaccagtagtaattaacaaaactactccagcaataataattaataccaatgcagccaacttaccgatagtagctaaattcattacatacttaactactttttgaccaaacaagttgatcacggtaataattgccatcaagatcaaaaagccaattgtgacatttattgccttattgggatttccgccaaaaattgaaatagttgacttaattaccccaacagccattacgccccaagctacactggctgagaagtaacgcagaactcccatataaaagccaatttttttaccaaaagcggccttggaataagcataggcagcaccagatttagtgacatactttgaagctgccgcaaacgaaatggccagaatcgctgcaaaaattgccgcaattaaatatacaactaaagctttactaccggcttgctgtaccacactaccaggtgttaaaaaaatacctgaaccaataatggcattaatcgctaacagcacaattgaccaaaagcctaatttatctcctgttttttcagtcatctatttgcttccttactttgcattatcaacaacaaacttaaataagttattcataaacgctacatcggaattacggtgcaacatttcagggtgccactgcacggcaatgacattaccttgtttattttctagcccttcaaccacaccatcaggagctgttgccactgcttttaaatctggtgcaacgtctttaattaattgatggtggaaagaattaacgcgaaattcagttttgcccaaaatttcagccaatttactatcagcttccacttccatactatgagtaggcaaagttggcgtatgaccttgcatgtgtttcaaagtaagttcttttctgtatgaaagatcttggtaaagcgtaccgccatgagccacattaataatttgagcaccacgacaaatgccaagtaccggaataccattttcttctgctaactttaacaagcgcatatcaaaatgatcgcgttcaggccaagtagcaccaatcttttgcattggctcctcaccataaaaacgtggatcaacatcatgcccaccagataagatcaagccttgaacatgattaagctgttcacgaatcacctcatcattttcagtaaatggaataatgtaaggcacaccgccattttgaactactgaatctacatagtcttcgttcacataactacgatggtatcctgggaaaattcctctatcgtcaataattacagaacctgagataccgataattggttttgtcatttatgctcctccttctgcttactttttgtatgtaatattatagagaaatttatgcaaaaagtacaattaaaaaattgcattgttgtctataatttttgcatatctttaaatatagtaaaaaacagcaagccttatttttagctcactgttttatgctatttataccaaattccaaaaaggatttccattacatgctaaatatgtttctagccactgtttaaaagagaaatcaaaatattgttcctctattccaggatacgttagataggactgtttttgattgtagcgatctaaattaatgcccatttctccctcgtctcttaaccaaagtataggtagataattaggtgttttaactaactgatttaagacatactcaatagtgtaaattctacaccttgctccacctaattcgatgccttgaaaagaatcaatgaataattctgcaccgttagcctgtatccaaaactctatcaaatcatttgggacagatatgcctgacaacctatttattttattttcagctactggcggatttaatttaaatttacagtaatagacgccaccaaaaccaaatattggtacgtcgacactgcattttttactaatcaaatttatattatctattatattatccattttaataattaataaaccatttagttataagcttatgtgcttcaattggtactggcattaagttgtcaaagtcattatttccaccataaattctaggtcttatatgatgaacttgattttcagcccaatactcttttgattgattgccataacgctcactaaactcttttatatagtaatatctatccatcgtagtccatactggtgaagaaggaagtctagaccaagtagtattgattggtgtttctgcatcttttttagagacaggatcaacatattcaggaaaattttgaccaattttattttgtaaataaatagaactaagtgaaattggataagtagcgctatttccattatagcctaccattccccatgctcctccaacagcaaaaaatgttgtagcagctggaaatacagcagaccctaacaaaccagtagtaatattgccttcttttacaattggactagctgtatttgtagtaattgggccggacaatgatggttcactatagaattgcaattgaactgaaattgcagcaggagctggaccagttattgaatcaatataaaaattgattttaaattgtccatctacatactcttgtgaagtatgaaatttaacaactgtatctggaatctctgccaaaaaagtatatgcagagtaatggctacttgttgcattaaaattattatgaatttttacagttccattttttaaaatagggacatctttttttacattttcattctttaacttatcttgagctaaagaatgaaaattttgttcattagctattttagcaacattcttatttacatcatttagcgagtcagcctttgcatttgtattgatagctataaagcacacgatagtggctaaaaaagcaaataactttctgtatttcatgtttctttcctcattatctataatttttaacacaattataaggatctttctattattctaccatacaactctatcacataagcaagtgctcccacactgtagcatcagatgctactgggatttacactctagattgatgtatacgaagaacacaattacaatcagaataacatgaaatactactatagcgacaatttaaaatatacagtaaaatctttaaactgtatttcttattctaacccttgttcaaagcgatactgccgtaatacatattccttgaaaaacggtaaagtaaaggccacttcaccataattagtagatttgataacttgatcatctaacaagcgtctacgatagttagcaacaaaattgcttggacggtttaacctttcatgaatttctttaattgaaacacaatgttttgggctctgagccatagctaaaacaaattttcggtcttgctttgacaaactactaagtactttggtataaacattttgctttagcaccaataagtactctgatttaatacattctaaagtgttttgatctattaccttactttttttagcagctttcaaaactaaataacctagcaactgaaaggcatatgaatagcccattgtcatcaacgccattttttcaagaatttttttcgacacttgataacctgattctttaaaaactttactatagctagcttcaacctgtgagagattcaatgctgataaagctattcgctttccacgtagtaagaatgaagttatattttcgtttttcaattcagagatattttcagaaagaccagctatcattaaggctataggataaccctgccgatttaataattgataacatcttgcaaaatctttcaactcctgacatagttttacttcgtctaaggtaatcaacactttaacgtcattttttcttacttcatcaaacatgttcgttaaaatatcttgatatgttaacttactaacgtctgtagaaagcgataatccaaaattagagaaatttagtccttcaatagatttaaatgatttttttagttttgaatctgcattcagatataagctattaataaaagaaggcaacaacttcatccccatggccaaattaacaacaatccaatctggatatgcactaatctttctgtccattgctgtcaaaaagacagttttgcctattccacgcattccataaacaatcgaaattgtatatgaactatttaaattctctattccttgagacacatcagcaattagtttttttcgctgcaaatacactgctggaattcggccaaagctaggattaaacggattatccatattttgtccccaatcattttcttatcaaaaaagcagcaggcttcttacctactactcaattttatttatctttttgatgcttaaccacataaatcagtgccgcaataatcaacactgctgcaccaaccgctactgaaatttgcgtctccggattaatgaacatgaagacaacaattactaccagcataatcaaagcaaagtaatttgaatatggataaagcggcaatttaaacgggtgattctccatcaagtgtggattctttcgtctaaagcgtaactctgctagcaggatcacaaaccaagctaccatccctggcaaaacagatgaactatagacaataacaaaaacattagccaatgatttattcaaaaattgggctaacacattaagcataaaaccaacgaaaattccactggtaattccaatgatcgcatgactaggcacgattctcttagatacgtgaccaaaagtcttaggtgcttcaccttcgtgtgccaatttatacaacattcgacttgatgaataaattcctgagtttgcaccggacaaagctgcagtcaaaactacaaagttaattactgaagctgccgcggtaattcccaccttggcaaaggtcgttacaaacggtgagccaatgctatctaatttattccatggataaattgtgacaatcacaaaaattgccccaacataaaagatcaaaatccgccacaatactgacttcacgcttttaacaatggccttatgcggatcagatacttcaccggctgaaatcccaattagctcaattccttcataagaaccaacaataatggccattgagaaaaagaagcccttgagaccaccagtgaagaagccgccatgactccacaggttagaaaagcctactggatgaccgccattaccaaagccaaatagaattaccgcaaagccaagtaaaatcattaagataatcgttacaaccttgatcatggcaaaccagaattccaaggttgcataagctttcgcactagctaagttagccaccagcaaaaataaaataataattacgccggcaacccaatcagaggtgcctttccaccaaaagcgcaaatactctgttgttgccaccacctcagaaattccgacaacaatgtattgaaacacgtttgcccattcggctaaatagccggcaattggatgcacatgctctgaagcatagtctgcaaaagaaccagtacctggatcaacataaagcatctcacctaatgcccgcattacgatatacaaaataaccccaacaaaaatataagctagcagtactgaaggaccggtccacttaatggttgagctagcccccatgaatagtccaacaccaattgctcctccaagtgagatcatttccatctgtccggctgtcatcgaccgctttaattcaggtgctttcttcgccatttccaactccctttctttagcatctgtaaaaatttcctaggaaatatatctattctcatttatctttaatcactataccttatcattttttcgaacaaaactgtagctgatcgctaaaaagattgcaaataaaatcgaaataatcaaagccagctgcgttgatttgataaagaataataagattaaaataccaatgtaaaaggcaagcgtaagccagctagttactgggtagcccggcattttaaagctgcctaaattctgcttattctgtttgcgataaacaatatgtgctgccataatcatgatccaaacaatcacaaaacaaatcgttgaaacagttgagacaacggagaatatttctgctggcattaaatagtttaaggcaactactacaaataaaattaatgaagaggtcatcaaagcgttcattggaattgcttttttggtcaattcacctagtcttttaggtgcatggccgttacgtgctaatgaataaagtgatcgactagttgaaaagattgcactattagtcgctgacatagctgcagtcaaaacgacaaaatttaaaatccctgcagccgctgtaacaccgatgccggtaaagacctggacaaagggacttgaagtagttgtaatgtgattccatggataaacagacataattgccaacattgagcccacataaaaaaggccgattctaactggcaaagtgttaattgccttaggaatatccttttgcggattagctgtttcactagcagtttgacctacaatttctaccccaacaaaggcaaaaacaaccatttgaaatgataaaagaaagccccaaatcccagttgggaaaaagccaccatgattaactaaattagttagtgaaacataaccgccctttacatgcgtatgaagtaacaacattacagcaccggtaatgattaagactacaattgccattaccttaatcattgagaaccaactttccagttcaccaaataatccgacatttaccatgttaatcaacatcaataagatcacaattactaaagggccaacccattgcggtagccacggaaaccagtatcttaaataaattcctgtcgcagtcaaatcagccatagctaaactaagccagcaagcccagtacatccagcccgctacaaattcggcacgcttacctaaatattttttgattgactctaaaaatgaatgactatcaggatcggctaaaataagctctcctaaagcacgcatcataaaaaaggtgataatccctacgattaagtacgacaaaataattgaagggccagcactatgaatggctgaaccagaacctaagaataggccagtaccaatggctccccctattgcaatcattgttacgtgacgactcttaagcccgcgttttaatctcggcttctcatccataattactcacaccttcctcaaaataaaaaatggagcggcatgttttttaaatgaaacatgttgctccatcaagtttgctttttttgaattatatagtcttataccaattcatgcaattattttttatctaaaaaagatattcccttaggaatatcttcattattagtaaactttaaattggttcaacggccagtaacgtactttaactacgccaacgatactactacgcttaatggttccgatataacggctatccttagaaacgctccggtgatcacccattacgaaatatgttcctttcggaatgcgcccagtatcctgcacatatttaatctgcgctctagtaaagtattgctggtaagtccgcgcccgcatcagtgactgcatagtaaaattctgagtctcagaataaaatgtatctgagccattatcaattaacttcgttccttgtttcaaccaaggttgagcaatctttttattattaatgtagatttgattatttttgctgacgattttttcaccaggcaaaccaataacacgcttaatgtacaaagcacctggttcatctggtgctttaacaatcactacttcaccacgcttgatttgcgcatgacgctcagcgattagccgatcaccattttgaaaagtaggttgcatcgaaagacctgatactgtatcgttgctcaagacgaagtggaaaagcagcagataggcaccgatcaaaataacccagataattaagatatctaggaaaaacttaccccatgattctttttcttcttttttctcagccattatttttctccatttatctttttccacagtttacaactttatggagaaattgccaaattacaaaaaagaggtatttcctcggaaatacctcttttattattaatgactattaattagtcttcttttttgtcttcagttttagcttcgtctgaaacttctaccgttacacccttcttagcaagaacatgagacatcttcttcaagtaaatgttaatgatcttgcccatgtcttgttcagtaagtgagttgaatggaacgattgcgtccaaacggttcaagaattcaggtctgaagtagttttcaagggctgagattaacttgtcttggtcaaccttgccatcttcaagcaacttgtctgagaagccggcgtttgaagtcataatcaagatagtatccttgaatgaaacagttctaccttgtgcgtcagtcaaacgaccgtcatccataatttgcaataatgcgttgaagacttgtgggttagccttttcaatttcatcaaataaaattaatgagtatggttggtgacgaaccttttcagttaattgaccaccttcaccgtagccaacatagccaggtgctgaaccgatcaacttgttaactgccatttcgtcttggtattcactcatgtccaaacggattaagtgttccttgttaccaaataattgaattgccaattgtttagcaagttcagtcttaccaacaccagtaggtccagtgagtaagaatgaaccagtaggtctgtcgctgtctttgaaaatttgcttacgagcaatagcgtcagtaattacatcgatagctctgtcttgatcaataacattcttcttaagtttcttagctaagtccaagttcttttgagcttcatcagcgtgaagttcactcattgggatcttagtcttttgttcaataattgcgtagatgtctttttcagttacttctggagtattcttagaatctacattcttaagttgtttctcaagttcagcaatcttactcttaatttctgaagccttgtcgtaatcctctgccttagcagcttcagtcttcttagcttcaagagctgagatttggttctttaagctcttttcatcagttgattgtacaagcaatgccttcttagcaccagcttcatccatcaagtcgatagccttgtctggtaagtaacggccttgaatgtatctttctgataattcaacagctaatttaagactgtcgtcactgtattttacgtggtggtagtcttcgtacttcttctttaagccttccaaaatcttaacagctacatcagtagatggttctggaacttgaacagcttggaatctacgtgataaagctggatctttttcaattctttggaattcactagtagtagtagtagcaccaattaacttcaattgaccacttgccaaagctggcttcaagatgttagctgcatccccattgttgttttctgaatcagtagaaccagcaccaacgatgttgtgaatttcatcgatgaataaaacaatgttaggatcgctcttggccttgtcgataaccttctttaatctttcttcaaagctaccacgaagacttgaaccagcaaccatgtcattaatatttactgaaatgatatgcatgttagccattttagctggtacattacctgaagcaattctttcagctaaaccttctacaatagaagtcttaccaacaccagcaggtccgattaaaacaggattattcttcttacgtcttgaaagaatttcaattacgttatcaatctgttcgtcacgaccaattactgggtcaaatttattgttcttagcttcctcaactaagtcaacaccaattggcttttcattgggttgttgtgggttctgttgaattgtttgtggtgcagcacccatgctgctggagtaattaattggaattgaacctgaactgcctttgctatttcttctgctaccaaagtcgtcattaaagaatgagctattcaattcgttaaataagttatcaaaatcattgtcaaagtatgccatatgtgcaacactccctatctcaaatttacgtctttagcactctagcttatcgagtgctaactcattacatttaatagtatagcaggttatccacagactgcaagctaaaaaacaaaagttttgcacattttcctttatttttgtgatttttatttaaaaaagcactacaaatgctgcaatataaacatttgtagtgcttcacaaattataaagaatttcttaagatgggcaaaaattgatgattattttgcttaaaactgttgaattttaaggaagttttccacagataagaataagtttattaccataaactatttctgcctacctctattattgcccttttgcttgtccagtattttgcggttcgctcaactttctcggcccaagaaaatactgtttaattactttgattacctgcttattctgaggtaaatccgagtgatccgcttctacacccgttactgtcattgcagtatagctcttgacttgattctgaaaaatatattttccggctgctacgctagcttctggtacaattccatcagactcataattttttccaccagataaggaataaacaatcaagtttttcggtagtttatctttgttcttgataaagttttctagcatttgcgttttatgattaatatttttttcaccaaaattatatggcgttcctagcgtcatcagacgtttgattttaatttcatcagaatagtaacagtagtaatgttctaaccaataggtccagatcaagccaccgttagaatgcccaaaggctttaaaattattaaacttatagctctctgataaggcataaaaggcttgatcaaaccagctggcttgcttcttaatattgctataaccatcgtgattattttcaaaaccgacaataatgaaaggttcgttgtcgtttttattaattttgcctgaatatgacagcgttccattcgttgaaactttaattttaagcacgctatgcttagtcggtgtgttctgatttagctgcttcactaattggttaaaacgttcagtcgttgcactagaacctggaatcataattactggtgacaaaagcgatttgcgtctttcagctctagcgtggttatcagccttcatccaagaataacccggaatagccaaagctactaataagactaagacgattgccaaccatttaaaattaggattttgaactaaattaatcatttttttcttcataatcctttagtcccctttcaagtcgcaaacctaatttcatagttggaataaacattattatatccaaaatgaataacaaaatagaaaataccaagttgctccaatcaccattggaaccaaagaaagagaccaaaattcctggtgtcccacttaaaacggggtaagcacaaggttgaattaaatggcaaaaaattgctccagcggctagtagaatattaataattggaataatcacaatcgccggcagtaacaatggatttaaaataatcggcatcccgaccatcatgcctccagttgagcccaaagctgctggaagcaggttaaccttggcaatattttcactatccttatttttactataaattaggataattacaatcatcgctaaaacaatactcgcaccacccatttctgcataaggataaaacaaagaactacccaaatacttatatggtacattccaagcactcccatgttttaaggcaaaatttaagttagctgctgctgaaatactattagaagtagttgacaaagaagctagaggataacctattcccatccagctaagtaaaaagactgggatagtcagtaaagctattaacaaaatattatttgattcctgtatttgagtaactaggcctttaaaagtactagaattcaagaatttgatttgaaattcataaattataatccccagaactatcccacaaaaaattgcaaatattgtcgggataaacgcattccaggctctttccttaattctagcggcatgttcaaaatcgactggcttgtgttcctttcctagccaatgaaaaatttgccctacaccatagccaattaacaaggccagcaagacagcattaatttttaaaacactggaagaaaatggtgaatgatcgctggcattattagctaaattattggcataagcacaaaacatgataacgatgacagccgtcatcccggccatggttgaatctttacggtataaacgcgcagtataacgtgccgcaaaataagccgcataaataccaaataagccgaaggttacccgaaccatcccccgactgacaaatgctcccgcataccaaaaacgatctggcaaagtgatatcaaaattaaaaatattgtaaataaaactatcgggcgaaaaaacggcatctctgaacaacttaaaatatgccccaattaccgcgatcggcatcagcataaccaacgttcgctgaaaaattctaaagattgccaatcttcttagtttaagaaagatatttgtgattctgtttaccatggtattttcctttacctatctattctaaatatgattgaataaagttaattaaaacaattattaattatacatctatactagaaagctgattatgatggcttacattaacttaaaaaataatactaaaatttaccaatctggtgacacaaccatctatgccaataagaacattactttttctatcgataaaggagaactagtcattattctcggctcatcaggagctgggaaatctactttgcttaatattttaggcggaatggaaccaaatacaagtggcgatgtaattgtagcgggaaaaaatattgcaaaatataacgctaaagaattaactacctatcggcgcaacgacgttggctttgtttttcaattttataatttgattcccaacttaacagcaaaagaaaacgttgaattagctgctcaaattgtccctgatgcgatgagcgccgatgatgccttgcagtatgttgacctagggcagcgagaaaacaattttcccgctcaactatcaggcggtgagcagcaacgtgtggcaattgcccgagccatcgctaaaaagccagccttacttttgtgcgatgagcccaccggtgcccttgactataaaacaggcaaacgaatcttaaaaattttgcaaaatatgagccggcaaaatggctcgacggtcttgattgtaactcataacgccgctattgccccaattgctgataaggtcatccgtattcacgatggaagtattcaaaaagtccagcataatctacatcccgctgatattagtacaattgaatggtaggtgggcgacatgcaaaaaactattctatggaaagatgcttggcaagcaatcacccattcacttgaccgttacattgccattattctattaattgcactggggacttttgcctttacaggtttaaaaatggctggtcctgatatgcgagcaacaggggcagaattttttgccaaacataacttagctgacgtcactgtcacttcaaactatggcattaattcaactgatcgccttactattcagaatttaccggaagtaaaagaagctacttttggctattttcaagatgttaaaattaaaaatcaacctgatacgctccgcatcttttctcaatcagataatctttcaagttatgaattgattaaaggtcattttcctaagaataaaacagagattgcactgtcatatttattgcagaaaaaatatcgcttggggcaaaacattacttttaataaacctggcattttaaaaaataagacttacaagattgttggcttcgtcaaagctagtgagttcttagataaaaatccaatcggtcaaaccaacattggcagtggccatttaactggaattgcggttgctaatcataacgccttcgccgcaccagtttatcaaattgcccgaatcattttcaaaaataccgccaatttaagtccctttggcatagcttaccgcaaccgtgtttataacgatcaaaccaaattgcaaactgctttaaaccaaaatcgagccgacaaatatgacaaatatcgggccatgtatcaaaagcaatatcgacaagctgcagctaaacaattacttaaacgtggcatcgtagttaacccggcgcaaatcaaagtaccacagaacaagcttaaaattgcttatcctaactacgtaatcaacagccgtgaagaaagtcagggttatgcttcttatcgagcagattctgaacgagttgaagttttggctaatgtctttcctgttttcttgtttgctgtagcggctttggtcagcttaactacaatgatgcgttttgttgaagaagaacggactaatattggtacgctaaaagcactaggctatggtaatggagcaattgccattaagttcttgctctatagcacctcagctgcaattttaggtgttattctgggggctagcttaggttacacctttttgcctaacttaatcatcaaggcctatttagctagctcaaccttaggaactgattaccagctgaattttgcttggggaccactattaatttcattgacgattgcactacttgcaacaaccgtcgtttcaatgattactttagctcaaactctgcgtgaacagccttcagctttacttttacctaaaccacctaaaaatggttcacgtattttactagaatatattccatttttatggaagcacatgagcttttcagctaaggtaacagcccgcaatattttccgttataagagcagaatgctgatgaccatcctaggcgttgctggttgtactggattactagtaatgggatttggtattcgtgattcactacacggaattggcaatattcaatattctgaagtacaaaaaaatgatgtcatcgctttgaaaaaccgccatgttaacacgactgagcgacaaaaattaaacaaaatttttaccagccatgatgttacgcaaactactgctgtacaatatcaacaattgactaaacaccttgatagcactggagcaactgaaaatgtaatgctaattgcgccacaatcaactaaaaactttagcaaatctatcaatttgcaagaacgtcaaagcaagaaaaaacttgttttgtcaaataatggtgtagtcatttcagaaaaattagctactatcttgcacgctcataaaggttcaacaatttccttaaaaaatgaacatgggaaactacttaagttcaaagttagtggaatctgcgaaatgtatctcggtcactatatctttatgagcccagctgaatatgccaaagaaattggcaaaaaatttactactaatgcctatttagtaaccatggccaaacattccccaggaaatatcagccatattagtcaaaaaatgatcaaaacaggcgcaatcgaaacggttgtctcaacttcatcaaatagaaaattgctgagcagtttcactggtagtctaaatgaagtcattctaatcctaattttaatttcagggatgttggccttagtagtcatctataacttaactaatatcaatgtcgctgaaagaattcgcgaattatcgaccatcaaagtgctaggattttacgataatgaaacaacgatgtacatttatcgcgaaacaatcatcttatcggcactaggaattatcgtaggctttggctttggttggtggctacaccactttattatcactagtttgccaccagatgtcgcgatgttcgatccgaatatgtacccgttgaacttcgtcttctctgcgctaattcccgctattatcaccgctattttagcaattgttgtccatcacaagatcaagcgaatcaacatactagatgccttgtcctccattgattaagcgctgttatgctataataatcactatagaaaagggtggaaaaaacatgccaagaaagcactttgaattaaacagtgatgttaataaattaatcgaaaaatatgatgaaattaataatgttgatttcaataagttagttaacaaggccttaagattctaccttgttaatcaaatgaactacaaagatgttcaagacgccctgaataaagctgataacgaagcttctaagtatattgatgaagcaatgcgttccagcatgggtgatattaatcgaaattattagaacataactaatcatggaaaaagccatctgttttgacagcaggtggcttttagtattcattacaagataatttattataaaaacaactaattgataatttctttactcaaaatgcttataccgataatatcgataacctatctttttaccaaaaatcgtctccgaagttttcatccaattagccagcaaaacataaatgcctaaaaagactaaaccgaagattgctaaataaccaaaactaccaacacggcctaagtcgttgaaacgatagccaaataaaatttggtaaacaaagagcaggataatgtaaatctcgtttgaaacaatgatcggcaacaaactccccatcttaacgccatatgtcttattaagcttgtgataactgagccaaattaccagtaagaatgaaatatcagttgaaagaattgcaccatccccattcatgaacatagtcatcggtacttgcaaaattatttttactaagacaccttcaaccatatagatcacagccagtttgttcatgttcaaagctaaaagcagtgttaatgaattcatcaccaaaccagcaaacaaactttgaacaatattttcaaccaaataatacgcacctaaactatcgtgtgagaacaagaccgtataaattggagaagccgcaaaagcaccaagtgcaacaaccggaagcaagacaaataatagtagtctatagttctctaaaagcagctttctaatgctttcttgactatcattagccttatacttaagccctgctaaaagcggcagactagtctcagaaacggctgtcgcaagtgaaataatcaccgtggtaatcttgcttggattagccgagaaaattgtgtacaagtaactaacatagcttttactcatatgactgaagctaatcaggatttgtttaaacaaaagttgatcaactaattgcgtaacagtaatgaacgatcccagcaaaacaaacggaattgaggcataccataagttaagcaaactacgagaaacattattaagtgctctgggctcgctattttcaattaattctcggtaatgtccccactgcttgcgcatatatgcaaaaagatacaggtaactagctatagcaccaacacaggcgccaaacacactgaaataaaccgccgttacgtaatcatgatggaagacttcaataatcaacaaagtagccagcaaaataaacaaaattcgagcaaattgttcccataattgggaaatcccatatggcttcatatcattatttccctgaaaccaacctcgaaccatactcattgatggcagaattactacggctggcactaatactcgaatagaaattgttgcactagccactgaatccactggactatttttggcaatcattggtgccgtcacataaagcaaaataccacacgctattcccatgaccagcataatagcgaagcctaatttggtaatgtacaaactgtctttatatctattttgcgaatttaattgcgatacttcccgggcaataactgaaggaagtcctgccgtcccaattgataaaaacagcgcatacggcgtatatgacgaattgaacagcgcctgtgcgtttaattggttgtggtagcttcccagcataattagccaaggaatcaaataaacaaccccgagaattctagatacaatgctaccaaacgatagccaaaatgaaccggataggatttttttattcaatagaatagcctcaaatctacgttagtttctcattgtgccttcttattatacgtggattttataactttgtgggaaatatgtaccaactagttacccttttttaacaaatttttcggctctaataatacaaatcagttacattatttactatattgttacccagcctttaattttacgttagaccccttgacctaaccttctttaattattatccttaaaatgtttctgttaaaggtcataattagacaaaaataataatgtattaagaatattcatcgggggaattaagttgtcattcaagaaaaagattatcactaaattagcttatgttgctatgctttcaactactggcgttgccgcagctgcaatcgtgcaaccacaagcacatgttcaagcttctaccacttcagttgctgctcgctcactcggaatcgatgttgctagttaccaaagtgctgatctttcagctcacgctaaaagcggtgctaagtttgctgttgttaaagtaagtgaaggtaccagctacagaaatcctaaggctagtgctcaaatcgctagtgcccgcgctaagaatatgatgccaatgggctaccactttgctacattttctgctaatagcgctgctgctaaaaatgaagccaactacgcaatcgcatcagctaaggctgttggtcttggtgctggctcataccttgcatgtgactatgagtcaggtgacggcaacaatatctatggtggtaagaatcctactgctaatgcaattaatgccttcatgagcaaggttaaagctgctggttacaagccacttctttacgctagttcatcagttttaagaaacaacattaacactaactctgttgttaacaaattccctaactcattatgggttgctgcatacgctgtttcaggtcgagtagacaatcctaactttgactacttcccatcaatgaagggtgtttcaatttggcaatttactgacaactggcgtggtcttaacgttgacggtaacattaacgttttacctcttacttcatcaggtagcgctgtttctcaagcacctaagaaggctcgcgtattaaagaagaaggctcatgtatataacaaggctggtcaccgtacaggcaagactattaagaagggcacttctatcactacccatggcaagaagaaaactatcaatggtaagaaatactacaagattgccaagaatcaatacattagatcagctaacctttactaaaaaggcaaaataagtcatcaaaaaatgcaccaggtagaaattacctgatgcattttattttatccaattttttacttggcgaattgttcaccagctaagttacggtagaagttagccttagcttgacggtaatatgggttaacccacaataaaccgatcccgcaggaaataataccaagtagccaccagccgatgaaacttaaatcaaaaataaacaagtccatcttatggccatccatcaacttacggctggcactgatagcttctgtggcagtcggctcatgaccactatctagcatgtcacgcaagatatatggtgtcactgcatatgaataagccttgatcagccctggaataatcagtaaccaagtccacaaaataagaaaaatttcatataaaatataagttaaaaagttactcttaaagtttctggtaaatggactaaagatacctgaaagaacattttccttagtaccactatctctaaaatgcaagatagtataaattacgccccatgtgattaagccaattgcaactgaaactaccaaagtaatcagccatgcaaaaggattaactcttactttatctaggtacatcaattcagcattgttaccgaagcggcggacaataccgtacacgatatcttcgcccttttcaaaaaagttttcgatatcggtcaaaatataaacgattagccagccaacaaatgacagcaaaactgcccagccccagttaccacgtaactggtctctagcttgttcttttaattcttttcttgtagtagccattttctctcctcctcacttttctaatcatgagtattgtcgcctaaaatcagggcagaatcaattaaaagcacatcaaaaaagcctaattccaccaacatcggaactaggctcacacagtgttgaccgccactctgaccacatatagaagataacattttcgctaccggagaaaatgactactaatagcgacggtacatgatagattttagcattcaactacctaaaagacaagcgaaaagacgtgttgaattagcggaatggataccaaaatttacggataaaaaagacgaggtctaaacctcgtcttcttcattactaaaattcaagcatcatcgtcattgcacgattgatcttctttttaatctttttaaactcaccagaagcagtatgattatcctgcaaaatgatcatgttctggccatctttagttgcccgcataaaggtataatacccttcaccagcaccattagcagctttataatgctttaaattataaagtccaccattataatagctaggagcctgacccttgaacagaacttttctactcttgttagtcaaaatcttaccagcaagaatatactgcatggtcttagctaaatctgcgttagacattacgattgaaccagcacccagctcattgtgagcatccttaacggctttagcatggttcactttgacatattcaccctcacgcatttcatagcctggtacccaatgactagccaataacttagccttgtctgaccacaagaactcactatgggttagcttcagtggcttgatatatgtgtcatggaacaattgctcgtatgactttttctcaagcttggacaagattccacaaaggaaaatatagtttactgaagtatagtgccacttacctaatttgctagcatcaaacacagtatattgtgcatcatgcttgatgttcgcttcatcagagataaactcaggcgtacctaattgttgaccagctttcaaatccagccctgatgtcatatcaattaagttgctaatcttgactgaactagcaccatctacatttgggtagaattttgaaagtttatcgctaagcttcaactttcctttctctacctcatgcatcaccattgcagctgtcattgacttttgaactgaattgatcaaatagctagtgtcaggtttattgtccgtcgcataattaagcaaaactttgccatgatttattactaaaactgagcctttaacgcccacatggtcaatagcctggcgcactattccgcttttaaacggtctttattgcttaaatcaactcgcttaacgttatccttgttttgccacttcttggagtagaagtagttagacatatcatagtcatagcgcttattaggttccttcatgaatggacgaacagcttgatcaactgcaacccagcctttccagcctaggtgaatagtatcttgcataaagtacttttcattgcctcgtcttgaaagatctgcaatattttcaaagccttgactggttaactggtgttccatcttagcaacagactcttggtacatcttgctagataaaccagtgtacttcatccacttgccattaattggtgggatgataaatagcacattagtgtgttgcttagcaaactgctccaacatcaattggaaatcaccatattctactgaatgtacatagtcaaaatcacgctgactacccttcaagcgtttcaataccttctttggtaaacgtgttctaaagaaggtattatcaatacctaagttgtttgagttagtgtgtatagcagcttgctctgctgcaaccttattcaaagcagctacagaatacttgttaggtaaaaccttagctctcttttgaatcttatttacacgatcacgcaattggaatgagctgaagaaattatcttcgttacgcaacattcgacgacgattttgtaaataaaatttttggaagctagtcaacttcttgccttgagcaatttgcttcagactattcttgatttcaccttttacatctggcatttccaacagacgtttagctgcataacgatcagttttattattcttggcactaagcaagaaattacatgcttgcaatggtgaataatacaatgcaaaggcattaggatcttgaccccgcttagtaaaccattgtggtgaaatgatcacaacagccttcttgtttctaagctgcttagctgttccttgcatccccaagaactgagccaaagattgactacccggtccacctaataagaatggacggtagtttctatgatacttttccgcaattacactagggtgaagtgggtcgaatcttgacaactcacttgaaccatagaatggcacgtagccatcttcaaaagcttcctgcttcattgtgctgcccttgaagacagttgtgttttgtgaagctgcagcctcgtaaatcatttgcttagaaaaagttctttcccaaggaataaggaaaacaactaacaaaaggataaaagcgcaaagaactgggccaaagatttgccacagccggcgtttattactcattttctaagctttccacctttgccacaatcttgtttggagtgtcccattcttcacggttaaattctgaaacaggaacatcaatatcaaacttttcttgcaagttcaaaagcatttgtacacttgccattgagtccatcaaaccattgtcaaagatgttttcatccatttggtctgataaatcttcaccagttaagtcatttaaaatatctaatacgccttgttttgtatccataattaatacctctcaaaaaacaactcaatacttattctacttccagccgaaccacagttgacttaggaaccctgagaaaatcaagaaactgaaacataccacattgaaggttaagaaaatggcgaaccatttagtaaacttgttagatggaatttgcttcttatgctttctcttgaatctaagccacatatcgttgatacaaatagctgaagcatggaatataccataaacaatataataccacgttaagccatgccagaaacccatgattaagaacaacaggaagtaagaaacttgtgataatctaattcgattcttaaacattttcttcttcattgcaaagaaagtgaatcgcatgtagatgtaatcacggaaccagaatgataaagtaatgtgccaacggttccaaaaatccttaatgttcttggaaataaatggcttgttaaagttcattggagtatgaatacccatgaagtatgagattgatacagcaaacaatgagtaacctgcaaagtcaaagaacaagtacatactgtagcaatacatgtaagctacaagccaccatgatagcttcaagccgccatttgcattacccacggctaaagcagcgacactgatttttggtagccaataagtaccgaagaaccaaccaataataaatttatataaaaagccttggaacaagtatctaacagcatactgcatatctgtaatgtatgcatcacgcgtaggtaccttatcataatcttttttaaatctacggtaacggtcaataggacctgaagaaatagttgggaagaagagtaagaaccttgcataagtaatcggatctaccttcttaattgccccatcacgcatttccataataacttgtactgtcttaaaggttacgtatgagattcccaagaaaccaatgacaaagccaattgagttatcaggaaaagcggtcaaatatttaactgcggctaatggaataattgccaaaatcacagccaaactaaagatccaagtcttatttttaccgtggtgacgataatactgataagcaaaggttaaggcaaattcgtaaaccaaccagattaacaggttaaccccttgctcccagtgatcaccatcaaaaatcaagaacaagaaaacaattgaaaaaattgcttcatatgtcttgagtcgatgaccgtaatatagcccaatgataattggaattaatgcgatcatcaaatagatgaaatattgcggattagaataaggctgtaagttaatgaaattaaaattcactacttattaacctccttaattaccgccttaatatctaccttaccgttttgtgaaataggtaatgcatcttggtagatgtaccgctgtggaatcatgtaaggcattatattcttagctaagtcttcacgaatcatcttagttaaagcagcgtcagaatattgacgacgaacgccttcttttaattcgatttcggcaacgatctgcttaacggtatgatccttattgtatttaggagccgcaacgccataacggacaaacttgttcttagttaagtagaaattgatttcttcaagctcgattctgtagccgttgaacttgatttggaagtcaattcgaccgcggtaaaatagcatatcgccatcaaagaaaccagcatccccactccggtagctacgatactcagcaccatcttcatggaaaaaggcagcttcagtcttttcaggattgttcatatatcctttagaaacactaggaccactaatgataatttcaccttcgccaggcttatcacccttagaagtatcaattgtaatcttagtgtcttcttttatcttaccgattggcaaacggtcatactttttaagaacttcatcagtaatttcaacttgagtaacagcaactgttgtttcagttggaccataggtgttgaaaatatgactatctgggaacttcttcttaagcatctcagcttcactgtgtggcaattcttcaccacagaacaagaaatgacttaagtctggatggtgttctgcatcaaaagtcttgtccaagaagcacatctgtgcaaatgacggagttgatacccaaacattgaactgcatctttggcaaagtttggaataatttaccaaagttttgagtaacatcatgaggcaaaactaccaacttaccagcagaaacaagtgctggataaagactcattactgacaaatcaaatgagtaaggtgcttgtgccaagaaacttggatgttctggcaaattaaagtctgacaactcccagttaacgaaactaagcaaattgtcgtggctaatttgcacacccttaggcttaccagtggtacctgatgtaaagataatgtagtagttgtcatcaccttcaacgaagttcttctcgtcaacttcaaaattgccgtcttcaacttcgctagccttaagaaccttaacatcagttaaatcaacctctggcaatggatcaatttccaaaactagcggtgacttagaaacgtcttgaatcatcgttaaacgttctgcattagaatagctagcaattggaatataagcgtgacctgacttaacacaaccaagaaaactagcaatcatttcaaaagtttgtccgccccaaatcataattggagcatgctctggaatatctaagctagcaattttacgtgcccacgcatttgaacgctttttaaggtcaccatatgtattagtttcaccgagatagtcgtaaacaacacgatctggttcgtttgcggcgatctcatcaattttcttaataacatcttgaatcatgtgatagcacctaccttaaaattcattataaatgaagtgaacagatgttagtccactatattcatataaatagataagagccatcaggattccgaaataaacaattgttttcaaaacaaacataccaatacgtttgcctcgagaatcaaccttcgtctttttattcattttttctcccttaggtaatcttacttttgcctttgccctatattactacaaatagtggcaacaaacgcactaacggcttatattttaacaaatttaaactttttcttaaatcttcagttatttgtttcaaattgcgaatgcgttttctttactgttgtctcttgcaatcccgataagcaaaaaataatggaataaagataactattgccacaaaaatcaaagcaaagatcattaagcgccatacattctgtggtttagtccacattttactctttgccgtcgccaacaaaaatgccgcaaataaagcaataacaattacttcaaccaggcaaaaaattaaatgagtattttgccagagatataagtaggttgttgccggaaataaacaaaaccaccctgaaaagcgtaaaagaaagatttcttttttacgataatctactttcattatagtttcctttccccattaactgccaaataacgcattaatattcaccgacaaaatccggtccataactacaatttctggtctggcgtagatcttagagcctgattcaaacacacatagtagttgtcccttataagcggtaatttgctctaaatatggcggcatggtaattaccagttctgcattcttttcgtctaaagcatttaaagctgaagttggaaaaacgtagagcttggaatcaccactaccataagattggctcaaaaaaattttattttggtaaattgcaattccttgaatttgcttatccattgaagtttcgccagttggatcggaccattgcagcgttccggtaacagatttaacttcattattagtaattgagccacgatttttaccactacgcgctatagtgtaagccgcaacttttcctcgaccatacatgttaaaaaagccaacaaacaattgaccatcataatatgtaacggtcgatgctttttcaactgcaggaatggcaatttgatatttatacttaattggtatttggctgccctctttataggcccttaattctgccattgaaaatgctgctagcgctgaagatttgcccattgagccagttatccagatatttttggctactggatcataagcaatcccacctaggtgtggccgaccaggtatttgaatcgttttaagatatttgcctgtcttcttatctaagacataaacaaccgaagcatgctcatgttcaccatcataagcagttagcaaaatatacttacctgcaaccgtaatcccctgtggtgtcattgcagttgctgtattgacctttttagttttaaaatcataacttttagtagcaactaatcccggcaaaacaaagtcttttccatcccacgtccgcggtggtacataattggcaactttattaataaaaggatatttttcacgcaatgctttttggtaattggcaaaattatgccaagcaggactagtgcttgtcccatccttagcaattttttcttttggccgttgacggatcatctcctgcttctgccaccattggtaaccgaaatagcctcctgcaccaatccctgcaagcaaaagcagtactagcaggaagcgcaaaattcttttaccaatttttttcaaaaaattactcccttctgtttaggaattgtccctattatgcaattcattataacgaaaaaacaattactttttgtttttaactccttgctataagctttatttactaaaaagataaatttttttgcaaaaaagtgctttcgtcacacttttttcacaaattaaggttatactagtaaatgtagtgaggaagaataatcctctactacaactcaacttttttgtttttcattcatactcctccaagtaaataatgaaaataaaaagaattgacttactccaattagtcaatttcatatctatccctttcggctcacgtgcgttgcgtgagcttttcttataccttaacttattctcaagcaaatctttaccttttcataataaattgaacacttttacttcacatttacccagtattatataaaccgtagcaagatggtagaaacttgctacaatactcccacttttttatttcattcattcttactcctccaaagtagatgaaactaataaggtccgcaaaaacttgcgggccttttcctttttcagcacttttttctgtataattaaggtagaaatgaggtgccgctatgttttcaccatcaatcaaacatttaatagaagaaaaatctggttcatttttaatccctgctagccgaattgcctttgtccaagcagacaatcctctttatcatgcctttttgattttgactaaggttaaatattcaaaaattccagttttagataaagaaaaacgagtcgttggcctgcttagtttggaaatgattacggacaagatgctgacgactgatgagatctccactgcccctttagataaattaaaggtcgaagatgtaatgcaaactaagtttgataaaataaacttcgttgaaaccaccctagaaacgcaactgcatctgttaatcaataatgctttcttgcccgttgttgatgatcgcggcgtgtttcagggactacttactagacgcgaatggattaaggcatttaactatgtagttcacacttatgacaaacactacgaaacaaaacgaataaaataacctccaagcagcctttaaggctgctttttttaactccaacatttattgagcaaaaatgtgtccagaccaataaagaatgttagaattaagcggtagacagatatgtttgtattttggggagggcaattatgaaaaatttaaaacgtcaatggaagtttattgtcgttttgattgctggtgcagttggattaattagccaatttgcattgcattcaaagagcctcttctcaatcgggaatcttcaatttccagttcatgccatcattattgatatcattggtatcttgatggcaatttctttactattggaaattttccacgattggaagccaggccgttacggcgtagacatcctggctgttatcgctgttgtttctaccatattgattggtgatgtatgggctgaatggatgattttggtaatgatgaccggtggtgaaacgctggaagattacgcaactggtcaagccaacaaggaattacgtgccttgcttgataaaacgccacgtatcgccaacaagttagttgacgggaagatcaccgaagttaaggttgatgacctgcaggtcggtgatactgttttgatcaagccaggtcaacaagttcctgtcgatggtcaaatcgttaagggcacttcaagcttcgaccaatcttcattaactggtgaatcagttcctgtgaccaagaaccctggcgacgacttaatgtccggttcagtgaacggtgatgtagcggtagagatgaagttaactaaggctgctaaggactcagaatatcagtctattgttgcgttagttaagtcttcacaagctcaacctgctaagttcgttaagatggctgaccgttacgccattccgtttaccgttatatctttaattattggtggtgtcgcttgggctgtgtctggggatgcaactcgctttgcggaagttatggttgttgcttctccatgtccactgttgatcgctgctcctgttgctttggtatcagggatgagttcaatgtcagctcaccatattattgttaagtctggtccaaccctagagaagttggctcgcgctaagacctttgcttttgataagactggtactttgactgaaaaccaattgatcgttgaccaagtcgttactgatgacaaatcatttgatcaaaaagaattgcaaagcttagctgccagtgttgaacaacagtcaagtcacgttatcgctagttctctagttaaggctactgacaaggatttaattcatcccgtaactaaccttaaggaaactaccgctcaaggtgttgaaggtgatgttgatggcaaacacgttaaagttggtaagttatcctttgttgcgccaggtcatgaaaaattaaacgtcacttcaactgctgtttacgtttcagttgacggtaagtttgctggttacatcactttgaaagataagatgcgtccagagagtcctaagactattgaacgtcttcgtcgtcaaggtgcagaagatatcatgatgcttaccggtgaccacaagcaagtcgcagaaaaggttgccaaagaagccggcattactgatgtccgctcagaacttttgccatcacaaaagattcaagctattaaagatgtgccaaagcacctacgtcctgtcgttataactggtgatggtgttaacgatgcacctagtctgaccgctgctgatgttggtattgctatgggtgctaagggtgctactgctgccagtgaaagtgccgatgctgttatcatggttaacgatatttctaaagttaacgatgcagtcgctatttctaaacacacaatgaaggttgctaatatcgatgttttaactgcaattggtgtcgttattatcattgaattgattgccttcactggtgttatcccagccttctggggcgctattttgcaagaagtagtcgacatgattacgatcagcttaggtttacttgctaagactaagccaagtgataagcaatttggtttggaagaaaaatagattagatgtgaagaagctccagaatcgatttggttctggagccttttttcatacataattatgcgtagcactgcaccagttcaatttgcatctaagttaaaaaactattaagattaaactcaactaaataatttttagtggttgggtttttatcacaataaaaactttcaagattcgcttctttgggtcaggaagcacttgaaagttttttgtttttttacagaaggggaaaatatgcattttttaggacaacttatcttaatcctcttaactacagttttgctggggcaattattcgcccgcttcaatatgcctgcagttattggacaactattatcaggaattttactgggaccagctatcttaaattgggttaagccaaatgatatcatcagtctattctccgagttcggggttattctgctgatgttcttagctgggcttgagagcgatctagatttattaaaaaaatacttcaagctaagctttactgtcgccacagtcggcgttatcctacccgttgttttcatgggcttagccagttacttctttggcatgcgccctcttgaagcactctttatcgggattgtctttgcagcaactagcgtttctatctccgttgtggtgctgcaagaagcacaccaactgcacacccgtgccggcacagccattttaggtgctgccgtagttgacgatatcttagccgtggttgttctgagtctattcactacattcagtcatgaaggtggcaagagcggcttaactaataactttttgcttaatatcttgattgaagtagtttacttcgtagttgtttggctgatttttaaatttgttgcgccatactttatgaaagcttctgaaaaaatcgacgttgactattccgtcgttatcggttcattggttttagccttaaccatggcttgggccgctgattttgttggtctttcagctgttgttggtgcatttttcggtggtttagcaattcgtcaaacaccacaatacaaagaagttcactcctctgtttccgcaatcggctactctgtcttcatccccgtcttcttcgctgatatcggtctttcaatgacttttgccagctttttcaaggatatctggttcattatcgttatgaccgttttagctattttatcaaaattctgggccggaaaatactccagcgaaatctttggcttcaataagaatgaaggcaatatcgtcggtgctggaatggtatcacgtggtgaagttgcactgattgtagcgcaaatcggaattaaccaccatctcttccctgaggatatttattcaagtctgatcctagtaattatcgttacaacagttatttcaccatttattttgaattactttattaaaaagagtcaaaatagtacggaatttatgtagaaaaagtctagcattcgctagattttttaatagtttaattttacaagtggcttatcataaacgcaattgtgtctacatggtaaaatcaatagtgagaggtgagaaatatgttacaaactccaaacaatattagagctgttaccgctcgtgacctgcgcaataattttaagaaaattgctgatgatattaatgactatgatactaccgttatagtagctcgtcccaaagataaaaatgttgtgattatttctcaaaaagaatatgattcatggcaagaaacttcatatcttctaggaactaaagctaaccgcgatgcattagctgaagctaaacaatcatttgaaaaccaagatcaacgaaataaagttttaaccccagaagaattcgaggctttaactaaagatgacgaagcttaaccttaattttaactacaatgcctggaatgaatatcttgaatggaaaaaagaggataagaagacttcccaaaagattgataattttattaaagaatgccaacgccatccttttactggaaaagggaaacctgagccattaaaagcgaatttaagtggtgcatggtctcgacaaagtaatcataaagatcgcatggtttattcagttaccacaacagaattacaaatatggcagttaaaataccattattccaaatgaaaaagctctttcgagcttttttgtttaacccaattttcctaaatcgattacttggtcatacttctgcaactcatttgattcatagtggtgaattacttcaataaaggtaaggtttgagtttaacaagtaattatgaatttgatctgatgtcttcttatcaagggatgcattaatttcatctagtagcaaaatcgatctatcggccaaaattgcccgtgctagttctattctagctagctgtcccccagacaattgatccgcattatcacccaaggaatagtcccagcccttttcagcaataatttgatccaaacctaatttttggcacacctcgctcaccttttcccgggaaatatttgcacctaaagttaaattaaaccacaaggtatcggcaaaaattactggggactggctagcataagcgaataaatctgtaaacgagcctggcttttgctttttgtcgttaagcaatatttccttggcatgaccatgctttccggttaataggaattgtaataacgttgatttacctacaccagatggtccaataactgcaactttttgaccttttacaactgcaaagttaatttgattagctaattccttgccttttctagtaagatccagatcttctatttgcaaatttgcaaaattataattggtctctttcttttcaaccttgcccttggcaatatatttttctgccttagcgacaattttcttagttgttgataatttgtttcgatcttctaaaatagtcaaaattggattaagaaatgaatttgacagttgaacgattgcaaataaggcacctaaagtagtttgacccttaaccaccatgtaaattcccactaagaatggggttaagaacgtaaataaactagcaatcaagttaatccaagaattagtatctagattgagtaagttcattttacgcaaagcatcttctaattgattgatcaaaacttgatttttcttaaccgcattatcgcgcttgttgtataaatttaatgttgtgctaccagccagaaagtttttaatatgactaacatatttatcattagcagttgtccaattttctgctgcagtttgaatcttcttttgaaataaattagaaaccagcatcggcaaacatgaaccgattaaaaataataatgtaactaaccaattaacacataaagcataccctagcgcaaaaacaatcatataggcctgcatcattatttcaatttcagcatcaaaacgattagtttccagcagcttaaaatctgtagtcaaaaagcctaagctagcagtattttcttcgctagtctgacccagcatcccctttaaaatgccagctcgcagcgtcgtattagtctcttgaatagcacttgtttttaaccgattgaaaatcagcgaagcaataaaagtcgcaataaacgccccaataacaataactagaaattgtgctaaatcgccaaaccttctttgcgtaccaacattggtcaatgtctgtaccatatatgcaaaaatgatttgttgtgtactagcaatcaagcctaaaatagttaacataatgaattttgcatgtgaagaatatttgtaaatcattttttgtcctcctgtattttacttgaggctagtatcgcaggataatgacgaaaaatgttagaaatttacagatctgcaaatcgaggtaaaacattatgttcaaatatggttcaatttacaaacaattgcgcaaagatcaagaaatcactcaaactgaagcctgcaagggtatttgttcaatctctaagttatcacgctgggaaaataatcaggtagaagttgagtttagcaccgccattgcattactcaggcgcatcaacattacgcttgacgaattcacgcattacgctgcaatgaaaacagaatttacattgccagacgacattataacggccattaaagacaatgatacaaaggtactcgaaaaatttgttcaggagcagctaaatcattatcacgccaacaaaaatattctcgaactcaaaaacatcattcttgtctgcaatcaattatttctcatgactggtaaaaactatctaacacctgcagacattaatcgaatcggttcatacctgcttcacaacaccgtttggtctaaatacaatatcttgctttttgctaactcaccgtttttgctaaattctaaaatcggctatcaaattgctctgcgaattattcacaattttcaccctacagaaagtttaaacgaaaatactactattttcatgggcggtttatctgatacagttattgccttagttttcaaaaagaagctagattacgctcaaaaaattcttaatgaattaaaaaagataggacttcccttctatctcatgttctttagttcaacattgacccttttacaaaaaattatcgactactgccacactctcaacgcacagcctgtattggcaatgattgatgccatagttcagctaaattgcatggaagttgctaaaaaatggcttgagatttttaaagacgtacaacaaatctggccagaaaaagaaaattaaaaaccgtaaaagtaatttactttcacggcttttgacatggtattcattatgcaagcttacaaatttttagcttttaattaatccttaacaacgtctttggtgttcaaccattgactcttgttgatcttaacgatcttcttgccagcagctttcttaacatccttagcggtgtaagttgaacccattgaaaccttttggctagtcttgtgaccttgtgcgtccaaaacattaactttttggttcttagtgtcctttacagcaacaaagatcttgtcaccctttttaattgcaggatcagttggcatagtttcggcaacacctaactttggagcagtaaaactagctgcttgactaactgaagcaccaacacccattaaactcattgaagcaactgcgattgaaacaactttaactaaattctttgaaactaacataatgaatacctctaatttctatatcacttaatttgttggaactttttgttccctcattccttacgtctttattgtataacatatgttattaattacaaggggtttatcgaattttttaaaaataattcagtcgtctcaaagtattgctataataacgattgcggggattttttgtccaaaagcattaaaaaagtgtctgagaaaccgttctttcccaaacacttttttaagcagctgctacttcgtttgaattttgagtcacttttctagtttttaaactgacaaaaatcgctacaattagtgttattacctggattactaataatgtaaccaaagcaacagtaacattgaatgaaccagaaattgtggttaatactgttgtcataattggagcaacagccattaagattgtatttaataagccaacagttgaagccaagattttatgatcaactgatgttactagccattgctccattttaactgaagcaactcctgcaatagctgccaagaaaaacattgttatcataattacgtaagtatttcctaggaaaatgcttgttgtagtaacaatacttaaactggcagaaataattactaaactaaaaactgttaattttttgaataattgtggtccaaacattgaacccaatgcaaagcctgcgccaataaccacaccaaacaaagcaatagtaaagctataagtgccgattagcatagttgaacgatgagctgcaagtacaattgttgtcaatggagtaattgtatctaaagctccatttaataatgcgattactaataccacagtcaataatcctgattgtttcttcacttgggtcaatgaagttttcattgtttggaaaaagttttgatcattaacttcctttttttcaagtggcttctgatccttctgatgttttaagccaacactggcaaataacaaacctgctaacaagaaagtacctgcattaacaaaggctaaagttgagtatgacattactagcaaaagtgctgaaccaatgaattgagcacccatactaataatttgatttacgccgccattaaagcctactgcattcccgtattcttttttaccaacaatatcaacaattaatggtgcaaccaagccacctgaatatgaaccaatagtatctgataagaaattcacaacaacgatgattaaaaccaaattccactgtgacattttagtgataaacaataatcctactaaaccatataagataaatcggacaaatgctgctaaaaagatattgcgaaactttttcttagtcttatcagcaaggtaaccaccaaagatctcgaataattttggaactgattcagaaattgcaattaatgaaagtgctaatgagtagttttgtaatttgctagcataagtcatgaaagccaagtagaaaagaatatcgcctgcgcctgaaagaaaactagctactgaaaatcttctaaagtctgcgtttttaagaaatacgttcataaatcttaccccctttttctttgtttcgtttgttgttgaaattataataaagtgaaaaagaaattaattttaaaaatggcgtattcgacattcggaggataaacctatgacaattggtgaattactcaaagaaaaaagactagcagaaaacaaaactcaaaaagcatgggttggtcatattatcagtacttcttattatgctaaagttgaaaagaatattcatagaattacagcagaggatttattagccattcttaaacataatgatctttcaattactgactttttcgaagaattagcagacaaaaaggatgaactaaaagcacaagtaaactcgctaaataaaacagtaattgatgctgtttatcattctgatgtttccaaagttaatgaagtcattcaaattattaaaaaaatggatctaccgactaagcaaaaacaagaacttatcttaatcaataaggggtttatcgaaactatcaaaaatgatctaagtgacaattatcagccagataaaaacatcgttcaacaactaaaagacaaaatttttagtattcctaattttaatagattcaaacttgaactctatactaatttcatgcaattttatgattatacaactaatattatgatcaccaaacaagtgatccataaaatagatcagtttaagagcgataaagagttattagcaatcgctggtattctattcaatctcctttcacaattagtcgaagaacatcattatcaagaaactgcaccatttatagcagctagtgagcatttaccctttttaccagacttatactttcctcaaaccggaatctcattgctaaaataccttattagttatcattttaataaaaaaacagcagacttagctaaagctgagatgattgcacaaacttatcaaattactggtctagaagactttggtaaaggtgcacaagaaattattaatgaagttaaagaggactagctttaagctaatcctcttgtttcaatctctaaataaaacctaacgcgttatagcacatgtgcaccaaaattgaatagcgcaaatctttggttgacatatagacccaagctaaaaccatgcctaagacccaatatactaagatatacttacttaatgccggatcatgcatatagccaaataaaaatccgcttgcaacaatacctagccacttatttctagtatttttcttagtgaaaaagatattgaaaaacatccctctaaagatatgttcctcacaaaatggcgcgatgaaaactactaggatcctaaataaacctgcattgtattccgctattttattcaagctttcctggttctttgaaacgccgccaccaactagattaagcatcacaatcgaacctactacaatcagtacaaaaccgatcatcgctattccgattctgcgccagtcccagtgtggtgtttcatcaaagccccaatcattttcttcttttaattgcctgcgataaatataggaaattgcaaacaaaactattaccgtagcaagcgccgtaacgaagacgcgatattgcgccaaatcaaatcgctgaggtctaaagtaaagtacttctaattcagaataaattaccaaagccaacacagcccctgcaatatttcccaggtaatgtccaaatctcttcatttttcattcacaccttgattctttcaactagtaatcattgtttctattataatgtaaataagaaaaaatacctaaggaggagtatctatctatgcttaatcagatcatcgcttttttggggagacgcggtgagttcttctacatttcagtctttatgttactgatattttttgcctttttaatctcttggcttatcgaaccaagacgtttgattaatggcgttttgtttactatctttatagtctcaatgctctcttggatcaccgttatggtgcacaaaagtacgagtcacggcttgcaacgtgcctatgacctactagttctagctgcattatttggcattgtcttattattaattttcgcctggatttttctattctggaatgcctatttcgtttggaaatatgaaagccatactttgcctaacttgcttactttaattaccggatttttagcattaattattagtattatcgtgctcttaggaccaggtaagtacttgccacgttggcttagtctcgcattagcttcaattcccgcgattgcaatttatttgggattggtgctttacaactttttggtaaacttgcttctatatcaaatttatcctcgtacctaccaccaagactatttaatcgttctagggtctgggctaatcaatggcgaccaagtatcaaaactgcttgcggctagaattaatcgggcaattcaatactctaaccgccagtatcaaaagggccgcaagcgccctatcctgatcatgtcaggtggtcaaggcgctgacgaaaaaatctctgaagcactcgctatgtctcgttttgcacaacggcgtggcgttagtgttgaccgtatcttattagaagatcaatcgaaaaacacatacgaaaacatgctcttttctaagcgtattgccacaaaagattttggtaattcccacttcagggcacgcttctttagcaataattaccatatttttagagctgctctcttggctaaggaagttggtttaaaagccaatggtgtcggtgcttacaccagattctactacttgcctaacgcaattatccgcgaatttgccggtgtgtttgtcatgcataaacgccgtcatttcgttatcatgggattaatcgttttattctttatcctgcaagctatcttagtcatgacaggattagaaagatttactgtaatttagaaaagagggatgcaatgcttcaactaaagcatatttttaagtcatataaggtgggggacaacatcacccacgctttagacgacgttacaatctcgttccgtgaccaggaattcgtcgctatcttaggtcctagtggttctggaaaaactaccatgttaaacgtaattggcggacttgaccgttacgaccaaggtgacttgatcatcaacggcaaatctaccaagaattttaaagagaccgactgggatgcttaccgcaacaataccgttggttttgtttttcaaaattataatctaatcccccacttgtcgatcatcgccaatgtggaactagggatgaatttgtctggtgtgcctaaaaaacagcgccatgaaaaagcaattgcggcgttaacagaagtgggattgaaagaccatctaaataaacgtcctaaccagttgtctggcggtcagatgcaacgagtagcgattgctcgagcaattgccaacgaccctgatattctactttgtgatgaaccaactggtgcacttgatactgagacttctgtccaaattatgaagttgatcaaaaaactatctaaagatcgactcgttattatggtgacccacaatcctgaattagctaaagaatacgccacaagaatcgttaatttccaagacggtaagattcgtcatgattctgatccttttagccctaataaggaagaagacaaatttaacctcaagcgtaccaagatgtcttactggaacgccatcaagttgagtttcaccaatattatgacaaaaaaaggtcgaactctgctaactgcttttgcttcaagcatcgggattatctcaattgccgtagttttagctatctctaatggttttcaaaagcaaatcaataccacaatgagcaaagctttagcaaaatatccgatttctatttcacagaccgcaactgacattacttcagctaatgcacgtaaagaatcggataaaaatgtcaaaaaccgcggctatgtaacggcagaacaagaccaaagcgaacaggcccaacacgttaataaaattagcacaaagtatgttaactacatcaagaagatcaatcctaattatgccaataacgtgtcttaccaacgcggcgtaagcttgaatttattagctaaaaacaagggaaaaattgaacgcgtgcaattttcaaatacggatcctgatcagactaattctgttctagctgctagatcccaagcgatgagttcaatgggactgggttcaagtgtctttcccactactttaaataaagagaaagactcatttttgaagcaaaactatcaattgctctcaggcacttggcctactaaggcaaccgacttggttttagttactgacaataaaaatactgttaacatcaatgccttaaaaaatcttggtttcgatttaaagaataaggaacacgtcaaattcggccaattagtaaataagcaatttcgtgtagttgctaacaatgattactatcagcaattgccaactggcatgtttattcctaaaaaggtaaataacgccatgtataacggtgctcaaaccaagctaaagattgctggtgtcattcgtcctaaaaacgaagattcaatggccttgttatcaactggaattgcttatagcgatcaactttcacaacgcgtgattaatgaaaataaaaactctgcaattgtaaaggcacaaaagaagagtaaccatagcgtattaactaaccaaaaactaaatgccaatgaaaagaaagctacaatgcagactcttggcggtaccagcatccctactggtatcatgatttatcccaacaattttgatgataaagataaagtacttgattatcttgacaaatggaacaaggggaagaaaaaatcagacaagattctctatactgacatgtcaaacgctgttaccacaatgactggcggcctcttaagcgggataacgaccatccttgtcgcatttgctggtatttcattaatcacatctatgattatgattggtattttaacttatacctcagtacttgagcgaactaaagaaatcggggtactcaaggcattaggtgcccgtaaaaaagacattactcgtgtctttgatgccgaaaccttcatcctaggtgttttctctggtgtattaggcattctgattgcttacctactaacattcccaattaacagtatcatttacaagattactgatctggcaaatgtagcccaactagatcctactgctgctattgttttgatcattatttcaactatcctcaccctcttaggtggtcatattccagcacgaatggctgcaaagaaagatgctgcaattgcattgcggagtgaatgaatttaataaagaatttgttacgttgttcacaataacctaaatttttagcaaaatatgtggtatcttagctttagcaaaaacaagtaagaaaggaacttttttcaccatgactgttaaaaaattagaaaataacagcgatgttaatgtagtggcagaagaaagcaaagttttaactgatttattgaatgaatcaactaagcaagtaatcggtcaagcagctttcgataagatccaaaacttaattaaaatctctgccgccaaagattatcaagaacttgaaaagcaaattgctagtcttaacaatcgcgaaatgattgttgttgcacgttattttgctactctcccactcttgatcaacatttcagaggatgtagaactagcaagtaaagttaatgtgcttaacaatactcatcaagattatctaggtaaattgagtgacacaattgacattgtagcccaaaagaaaaatgccgaagaaatccttgaacatgtaaatgtagtacccgttttaactgcccatcctactcaggtacaaagaaaaaccattttggaattaaccgatcaaattcatcaacttttgcgcaattatcgtgatgtgaagaatggcacaattgatcgcgatgaatggactgaacaaatgcgggcttgcattgaaattttgatgcaaactgacattattcgtggtcacaaattaaaggtagctaatgaaattaccaatgttttggcttactaccctaaggctttaatccctgcaatcaccaaatttactagtcgttacaaggaattagctaaaaaacacgggctaaacgctagtcatgctacgccaattaccatgggaatgtggatcggcggcgaccgtgacggtaacccttatgtaacggctgatacgctagaactaagcgctactttgcaaagccaagtaatctttgaatattacattaagcaaatcaataagctttatagagccatttccatgtctacttcttatatggagccatctgacgatgtaatgcacctatctgagctttctaatgatgattcaccattcagaactaacgagccatatagacgggcattctactatattcaaagccgtttagtgcacactgaacaaaaattactgaatattactaacaagaacactttcttaaagaaacgtgacctccaaaatcttgataaaatcccttgttatcaaaatgctcaagaatttaaagccgacttagaaatcatcaaaaattcacttgaagaagaccatgatcacgccgtagtagacagctactttactcaaattcttgaggctatcaacatcttcggcttccatctagctacaattgatatgcgtcaagattctagcgttaacgaggcctgtgtcgctgagctacttaagagtgctggaatttgtgacaattatagcgatttaagcgaagacaaaaagatcaagcttttactcaacgaattgaacaatgatccacgtaacttacacgccaataacaaacccaagtctgagttactacaaaaagaattaaagatctacaagactgctcgtcaattgaaagaccgtttgggtgaagacgtcatcaagcaacatattatttctcacactgagagtgtttcagacatgctagaacaagcaatcatgttaaaggaatacgatttacttgataatcaaaaagcccgaattcaagtggtaccactatttgaaacggttgaagacttgaataatgcccgggaaataattaaggaattcttaagctttgatatcgtcaagaagtggcttgtttctcaaaataattatcaagaagttatgttaggctactcagattccaataaggacggtggctacttagcttcatgctggaacctttataaagctcaaaaggatctaactaagattggtgaagaaatgggtatcaagattacctttatgcatggccgtggcggtaccgttggtcgtggtggtagtccatcatacgaagcaattacagcacagccattcaagtcaattaacgatcggatgcggatgaccgagcaaggtgaaattatccaaaacaagtatggtaataaagacaccgcctactacaacctagaaatgttagcttcagcaacaatcgatcgaatggcttctaagcaaattgttagcgaagatcatgtcgcagatttccgttcttcaatggatcaaatcgtagctaaaagcaacgaagtttaccggaaactagtatttgagaatcctaacttccttaagtacttcttccaagcaactccaatcaaagaaatctctggtcttaacgtaggttcacgtccagcttcaagaaagaaactcactgacttttctggcttaagagccatcccttgggttttctcttggtcacaaagccgtgtaatgttccctggttggtatggcgtaggttctggtttcaagtcatttatcgatgctgatccagccaacttgaaggaattacaaaatatgtaccaaggttggccattcttccactccctgctttccaatgttgatatggttttatctaaatcaaatatgagaattgccaagcagtatgcggatctttgcgaagatgaacaagttaaatcagtctttgatatcatcaatcaagaatgggaactaactaagaaagtcatcctacaaattgaaggtcatgatgaattaatcgaagatgcacctactcttaagaagagtctggaatacagaatgccttacttcaacattttgaactacatccaattagaaatgatcaagcgtgatcgtgaagatgtgattcaaggtgtttaccaaagtattattccaattactatcaacggtgtggcttccggtttacgtaattcaggataaaaaacacataaaattcagctaaaaaaggctcctcattgcctgttttatcaagcatttgaggagcttttttttaatttattaaactttttagttacgcctttttcataactaagttaagtggcgttacaattactggaacgacaatggctgtaaaaattgcttctactaaaccgttcatgcccagtgccataattaaaattaaaatcaatggcgtacctgaactataatttcctaggtaatgagttaagcttgctggatcatgcatgaagaaaatactcgtcagcaaaataaccatcacggtattagttaacgaagtgactgctccacttatgatataacccaatttcgcatatttagtcttactcatacccttcgcaataattcccgggaaatagccagccaaaatacttggtaccaatgaaattaccggattttggaacaacattaagctgaccatatcgccaggttgagtatatgcaacaatcaatctggtaataccccagaataagccaaagcctagacccgccttttgtcccattaacgtgccatagacggcaattgtcattggaatagtagttacagctggcaaagccgggataattcttacatagccaacatttggcacaaaagtctgtacaatcaataaagcagcaaagacagcagtaattgctaatcttttagtttcttctcttctcatatatttctccaacttaattctttagactcaattaaaccataattaagattttttctcagcaaaaaagtttattatacaatatctaggtatattttatctaatatgacaagatattgtatttttttattatttttttacttaattatgcattatccttactctctctaatgcataatcgtgttctataccaattaagaatccctttatatcaatactttatgttgtatgtcaattttgacatagccactaaatattgttaatctcgttttgtgttaaaaatcatttgatggagagaggatcaattttatgaataaaaaagtcaaaaaattactatctattggtgtgcttgcattgagtttaggtgcaattttaaccgcctgctctggtaaaaaacagggtgcaagcaataataaatcaagcgatgccaagcactctattgcattaattactggcggtaatggtgtaaatgataactcttttaaccaatctgcttgggaaggatttcaaagttatggcaaagagcacaacttgagccgcggtcgaaacggttatcaatattttcaatcaagtagtgctgctgatttcactcctaattttgatcaggcagctaaagctggttatcaaactatctttggcgttggttacagtttaaaagatgccgtagcttctgccgccaaacgctatcctaaaaagaattttgccattattgacgatgtaatcaagggacaaaagaatgttgtctcagctaatttcaagagcgaacaagcttcctacttggctggtgtcgtagctgctaaagaaaccaaaaccaacacggttggcttcatcggcggtgctcatggcgatattgtcgacctttttgatgccggatttactcaaggtgttaaagatcaagccaaaaaaatgcacaaaaaagttactatcttaaaccaatatattggcaactttactagttcagacaaggccaaatcaattgctcaatcaatgtacaccaaaaaagccgacatcatcttccatgctgctggtggtgctggtgatggtcttttccaagaagctaaagccattaatcaaactagaccagctaaagataaagtgtgggtaatcggagttgatgtcgatcaatctcatctcggtaactacactgctaaaggtgggcaaaaatctaattttgttttgacatcagtaataactggagtaaatgttgctgtcaaagatatcgccaatagagcttataataataaattccctggtggcaagaatttggtttatggacttaaaaacaatggtgtttctattgaacgaggacagatttcagcttcaacttggaaagatgcccaaattgctagagctaatatcctaaaaggcaaaattaaggttgccattcatcctaacaataaataaaagcatactagtatagtttgctttttataattacaatcaattattttttgcctgatcaatctttttgttgacaaaataccaaacaattaataaacttatttataaattgttcggtattaatattgtggaggacagaaataatgaacgtaaagttcaagaaaattttatcatttggtgtcgttttagcatcagttggcttgattctaactgcttgttcgggtaaaaagtctggtcaatcagccaacaaagatactaaacatggcattgccctaatcacagatgaaaatggtgttgatgatcattcatttaaccaagctgcatggtcaggatttaaagcatacggcaaggaacatggtttaaaacaaggaaaaggtggttatcaatacttccagtctagcagtgccgcagacttcactcctaactttgatcaagccgctacagccggctaccaaaccattttcggtgttggctatcaattagccgacgcagtcaagcaagcagccaagaagaatcctaaaaagaatttcgttatcattgatagcgttgactctgggattaagaacgtcgcttctgcaacctttgaaagcaatcaagcttcttatcttggcggattggccgcagcttacaccactaaaaccaacaaagtaggtttcattggcggtgctaagtcatctattattgatttattcgaagccggttttaagcaaggtgttgctgacggtgctaaagctcttcacaagaagatttcagttcaaacccaatacatcggtaacttcacttcaaccgataaggctaaatcaatcgctcaatcaatgtatgctaaccgcgctgatattatttaccaagcagccggtaacgcaggtaacggtgttttccaagaaggaaaagattacaaccaagcccgtccagcagctaaaaaggtttgggtaatcggagttgacgttgaccaatctaacctaggtaactacaagtcaaaagatggtaagaaagagaacttcactttaacttccgtcttaaagggcttagatgttgctactaagtcaattgctaatgatgcttacaatggtaaattccctggtggtaagcacttagtttacagcttaaagggtaatggggtttaaatcaccaaaggtaatttaaacgctaaaacttgggcagcagtacaaaaggctcgtcaacaaattattgatggcaagatcaaggttgctactgctccaactaagtaattcagctgcttagtattttgagaactcttcgttttttagcgaagagtttttctatagttaattaaggaagtatttatttacatgaaagaacagagaaataaagtaatcgagatgcgtcatattgtcaaagatttcgatggtttcaaggcaaatgacgatattaaccttacgctctatcaaggtgaaattttggctttgcttggtgaaaatggcgcgggtaaatctaccttaatgagaattttatccggcttgcttgaaccaacaagcggtgaaattctggttaataatcaaaaagtaaatattaaagatccaaccgtcgctaaaaagttaggcattgggatggtacaccagcacttcatgcttatggactcatttaccgttttagaaaatattattctaggacatgaatcaactaaaggaccagttatcgatctgaaaaaggcaagaaaacaggtcctagctcttgcacaaaaatatggctttgctattaatccagatgccaaaatctctagcattactgtcgcccaacagcaaagagttgaaattctaaaggtactttatcgtggtgcagatattttaatttttgatgaaccaactgctgttttaaccccacaagaaatttctgaatttattaaagtactcaaaaatttagctaaagaaggcaaatcaatcattttgatcactcataaattagaagaaatcaaggctgttgcagatcgagttacagttatcagacgtggtcacgatgttggtacttttgctgttgatcaagttagtgatgagcggttagccgaattaatggtggggcggcatgtcaacatgaagctaaccaaaccagcacctaacttgggcaagcaaattctagcaatcaaaaacttacaggtaaaaggaaatcacggtgccttaagcgttaaagacctttccctttcaatccgtggaggcgaaattttagggctagccggaattgacggcaatggacaagatgaactggttgaagcaatcactggtttacgccatgttaagtcggggcaaatcttaattgatagtcaaaatttaaccaaccaaaaagttcgcaaaatcaccgaagctggcgtagcgcatattcctgcagaccggcaaaaatatggtttaattcttcacatgtcattagctgacaacttagcgctgcaaacttactaccaacgtcccttctctaatcatggcatcattaatcatcaagcaattttgaagcatgccgtagatttaattaaaaaattcgatattcgaactactagccctgcattgccagctagcgacttatcgggaggtaaccagcaaaaagcaattatcgctagagaattaaatagaaacagcgatctaatcattgcattccagcccactcgcggtttagatgttggtgcaattgagtatattcataagcagcttttagctcaaagagcagcaggaaaagctatcctattaatttcatatgaacttgatgaaattatgcaattatctgaccggattgctgttttacatgatggtcaaatttcaggcgaagtattacctgaaaaaactacagatcaagaactaggtcttttaatgaccggtgttaagaaagaagatgcaacaattgattaaagttacacctaaagtcaaaaatattctagtaccagttatctcagtaattgctggttttatagttggtgcaattatcatgctgatttggagttataatccttttcaagcatacagctccatgttctctagcgcactgggcaatatgaatggtattggtgaaactattcgtgaagctacgccattaatttttattgctatcggttttgcaattgcctcaaaagctggcttttttaacatcggtttgccaggtcaagcacaagctggttggttgacttctatttggattgtattggccaatcctcaattgcctaagccagtattattgcctttagctattattgcaggcgctatagctggtgctattgtggcaggaattgctggctatttaagagctcaatttggaactaatgaagtaattactactatcatgcttaactatattgtgctctatacttgtcaatatttaatgcaacaagtaatgtcctcaaaattaagaattgataccgatactaccaaaacaattccagccaatggcagcttaaagcttaactggttaactagcatgtttggtgattcgcgaatcaatgctggtattttcttagcaataattggacttattttttattggtatttaatgaaaaaaactaccgttggttttgaaatcaaggcagttggactcaatccttttgctagtcgctatgccgggatgtcttctaaaaagaatattattatttcaatgttactttcaggtgcattttctggcttaggcggtgtagtacaaggacttggtacctaccaaaactacttcactcaaacaactagtttggatattggctgggacgggctttcagttgccttacttggtggtggaactgcaattggtattttattagcttcacttcttttctcaattttaaaaattggtggtttgggcatgcaaactattgccggtattccttatgaaatcgtatctatcgtaattgctgccatcattttcttcatcgctatcaattatgtcattggtttgctttttaaaactaagaagaaccgcagtgattactacattccaaccagaaaagaaaaaggacccaacaatggtgttgatggtccaggtagaaaagtaatcgaaggagaaaaataatgaatttcgttacaatgatggcgttaattgtttcatccactttagtttattctgcgcctctaatcctagcttctcttggtggtgtttacagtgaaaactctgggattgttaatattggcctggagggtatcatgaccatgggagcctttgcggcgattgtcttcaacctaactttcgcttcaacttttggtgcagctactccttggcttggcactctagtcggcggaattgttggtttgattttttcattgcttcacgctgttgccacaatcaattttcacgctgatcatgtcatttccggaacagtgctgaacatcatggcaccacctttgggtgttttcttgatcaaggcaatttatgataaaggccaaactgaaaatatcaccgctaactttggctacttcagctttcctggtttaagcagcattcccatcgttgggccaatcttcttcaaaaacacctctgcccctgcttggattgccattattcttgctattttgatgtggtggattttatataagactcgctttggcctacgcttacgttcatgtggtgaaaatcctcaagcagctgacacaatgggaatcaatgtctatggcatgcgttatgcaggtgtattaatttccggctttatggcaggtcttggcggtgccgtctttgctcaagcaatatctggtaacttctctgtttctactatcgttggacaaggattcatggctttagctgccgttatatttggtaaatggaatccaatcggtgcaatgctctcatcccttttctttggttttgctcaaagcttaagtattattgggcatcaactgccaggaatcgatcaaattccatccgtttacatgcagattgcaccttacgttattacaatcatcgttttggtcctcttcctcggcaagtcagttgcacctgccgcagatggggttaactacatcaaatcgaaataaggaaaaaaggttgtttcacatgaaacagccttttattttacacatgtccacatagttatccacaagatatagcacttatatgtggtagtcttactatatcttgtactaaataacagctatcggcgttttctcagttggcattggaaaatcactgttaagcaatctaagctcatcatctgtaagtttaatcttttgtgttgcaatattttccttcatgtgttctacactacttgccttaggaatcgttaaaacattgccattgcgcatcgtccaagctagcattatctgatgaggcgtaacgccatgatcacgtgcaacaattttcaaattacgcgtaattcgaattgtgttgcccttgcctgaattaaatggtgaatacccaataaagtttacaccgtgctcttcttgccaagcttgcagatcaaattctgtcccacgttcactgatattgtataagtcttcattagcaaagcattcttctccacctggcactgtaaaaagctcctgcatatcagccgtatcaaagttagatacaccccaataacggatcaagccatctttttgtaatgcttgtaagccgtggatcgtatcagacaagcgatgactgccccgccagtgtaatagataaagatccagatgatctgttccaagacgttttagactggcttctagactctgacgttctagttttggcgttgcatgataggggtagaattttgaaatcaaaaataatttttcgcgatcatatcctttaatcgcttcaccaattagctcttcgctttggccatccccatacatttcggctgtatcaattacactcaggccatgatcaaggccatagcgaatagctgctatttcatcttttttctttttaggatcttcacccaaaccccagctaccaattcctaaacctgttagtttttcaaaattcatcctcgttcacttccttatgttcaaattttaacataattgattcgtaattatttttatcaatcaattgacaaaatggtctattccattttataatggactagaccaacaaatgaggaggacttaattatgaaagttattgttaccgaaaataaaattcaaggtggagcaaaagcatttgaaatttttgaaaaaggaatcaagaacggtgctaaagtcttaggtttggcaaccggctcaacccctgaaacactttaccaaaactgggtaaaaagcgatcttaactgtgaaaatcttaccagcattaacctcgatgaatacgttggtttaaccccagataatcctcaaagctaccactacttcatgcaaaagcatttatttgacaagaagccatttaagaagacttacgttcctgacggtatggcaaaagacgttgatgctttttgtaaagaatatgatcaaattatcaaagacaatcctatcgacattcaactattaggaatcggccgcaatggtcacattgcctttaacgaaccaggcactccattcaacatcggcactcatgaagttaagttaaccgaaaatactatcaaggctaatgctcgcttctttgacagtatcgatgaagtgccaaagagtgctatctgcatgggtactgctaatattatgcaatctaagaagattgttttgatggcttttggtgaaaagaaagctcacgcaatcaagaaaatgattgaaggcaaagtcactgaagaagtacctgcatcaattttgcaaaaacacccagatgtaacggtgatcgtagacgaggctgccgcacaagaattagacgacaaatacaagaactaaaaacaataatttaattatcagcatagaaaaagctaggctttctacaatcgtggaagacctagtttttttatttagcagcctgtatctacaatgaaatatacttcacaaaattgcatttttatataaaaaatgaagcataattcagttttttattgaattatgtttcattcctattcgattttttatttctacccttgacttttagatgtgaaacataatcaaaaaatcacttgtgtgccacaacatatcgtattaaacttaataattgtctacatatggtatttaagaaagaatgtgattcaagttattgttttaagtgggccaattggagccggtaaatccagtttaaccagtattctagctgaacatttagggactcaggcattctatgagggcgttgataacaatcccgtattgcctttatactacaaggacatgaagcgttacacttttttgcttaacacttacctccttaaccaccgtttagcacagatcaatcaagcaattcaagaaaaaaacagtgtctccgatcgttctatctatgaagatgcactgttcttcaagatgaacgccgatagcaaggtcgctgatccaaccgagttcaagatctacgatgacttactcgacaacatgatggaagacactcctggcaatccaagtaagaagcctgacttactgatttacattcatgtctcccttgatactatgcttaaccgaatcaagaagcgcggtcgttcatttgagcaaatcagcactgatccaggtttgaaagattattacgcaagacttttaaagtactacgaaccatggtatgaaaattatcatgcctcaccaaagatagaaatcaatggcgacaaacttgattttgttaccaacatggatgcacaaaaagaagtacttaaagaaattgatgaaaagttgcatgaaatcggcaacttataagaaaaagaaggaacgtgatgacagttattgttttaagcgggccaattggagccggtaaatccagtttaacaggtattttatctaaatatttagggactaagcctttctatgaaagtgttgatgacaatccagttttgccacttttttacgctgaccctaaaaaatatgcattcttattgcaagtatatttcttgaacacacgcttccacagcattaaagacgcgctcactgaagataataacgtcttagatcgttctatctatgaagacgccttattcttccaaatgaacgctgatatcggccgtgctacttctgaagaagtcgatacttactatgagttattgcacaatatgatgggcgagttagaacggatgccaaagaagaatcctgatttgcttgttcatattaatgtttcatatgatacgatgatcaaacgaattcaaaaacgtggtcgtccctatgaacagttaagttatgattcaactttagaggactattacaagcgtctgcttcgttattacaagccttggtatgagaactacgattactcacctaaaatggaaattgacggtgataaattagacttcatggctaatccagatgataaagaaaaagttttggatcaaattacagccaaactaaaagagatgggcaaattacctgaagattgggaaaagcctaccgatattcaaattgaagcataataaaaaccattcatttgcgaaattatcgtatttgaatgattttttgtttacagtgaatttttcgctttattgttgtataatttgaaaaaatgtgtttaaaggaggagtttgaaaatgatgttaaccgtaactggtggacaatggtttttcccacttgtcataatttgtctaattttgggtattgtcgcaaccatcgctcaaaagaaaaagctgactaaactaaaaagaataaccgataactttgcctatgcaatattagttattctcttaatcattgaatggattctatattttcaaaaacaatttaattttattactccagcaatctacacccttgttgtcatctatcttattggacggcaattactaatcagataccgttcttctctattgaaaaaattaggggctaaatataagcaactgacaattggacttgctactatttacattattttagttaccttattgcttttaatcggatctaaattttcaactatgggctggatcattgctggattagttatcgtagcctttggcttcgttagctacatctttgaaaaagacaaacaataatttcccaggaaataataactcgcatagagcttctatgcgatttttatttattcaatttttgctaatgccttcgcaaccccatcatgattgttatcagcagtaatttgttccggagcaaatttttgttttagttctgctggggcattacccattaaaaatggataccccacttcttccaacatatcttcatcgttatagttatcgccaaaagcaatgcaattttgcaagtctacgccatattcttgagcaactattttgactgcactagccttgcttacaccctttaaaacaaattctaataaattctctgctgatctaacaaaagtcaaatcaggatatttagcagttaattcttcttgcatacgatcaagatccgctgaatctcccataattagacctttatgcacgccctgcagtttttcaagttgattaattgtagtcggtgttgcttttacatcgacaattctttcttcatttttaacccgtgggctcttttcttcactacaataccaaacatagccactatagatattccaagctgcatcattatcttgctcatcaacgtagcggcaaatttcagctgcttcttttgcattaaaaaaacggctgattagtactttgcctgtttcatcaagggctaaagcaccgttatacgcgataaacggacaaactttcaaaatttgattaaccactgtcatcatccctttaggaagacgtgctgatgcaggaacgaaaatattaccattaataatttgtctacgaattgcatcccgcgttgcggcggttacctttaaatcatcattaattaatgtgccatcaagatctgaaaaaataagttgtgcggacattctttcacctttatttcttttttaattcttatatcctaggataatgctttatttatgctaatgaaagctgattcaattaaatgcttttcctatcatttaaagataaattgcaataaatgcccaagtaatcattaaaataattcgcgtttacaaatttatttatcaatgctaaagtataagagttgtgttcaataagttaaaacacgaacaatattttggggagataaaatgaattttataaaaagctactttcaattagataagtacaaaaccaacattcgaactgaatttattgctggtttaactacctttatcagcatgtcctatattttgtttgttaaccctagcgtactgggcgccagcggtatgaataccggtgcagtcttcaccgctactgctttagctgccgctcttggtactgcaatcatggggatcgttgccaactacccgatcggtgaggcaccagctttgggaatcaatgccttctttgcttacaccgtatgtattgggatgcatgtttcatgggaaacagccttggcttcagttttcgttgcatcaattattttcatcttaattactttattcaaattaagagaaaagatcattgattcaattccagctgacttgaagttcgctatttcatcaggtatcggtttattcattgccttcttaggtttgcaaaacggcaagttaatcgttgcaaataaatcaactttggttggtttaggttcacttcacgatccacttgtttggattaccatttttggtttgcttgtaactgttatcttgatgatcttaaacgttcctggtgcaatctttatcggtatggttttggcagctatcttcggtatttgtaccggtcaaattgcattgccacacaaggttatctcaactgctccaagtttggctccaacttttggtcaagctatcttccacgttaaagacattaacactgttcaaatgtgggttgttgttttaaccttcctgcttgttactttcttcgatactgcaggtaccttaatcggacttgctcaacaagctggtttcatgaagaacaacaagatgccacgtgtaggtaaggccttagcagctgactcaagtgcgatggctgttggttcaatccttggtacttcacctgttggtgccttcgttgaatcaagtgctggtatcgccgttggtggccgtaccggtttaaccgcagtttttgtagcgatctttttcttaatctcaatgattttcagtccattgcttggtgttttcactagccaagttactgctcctgccttaatcattgttggagtattaatggcacaaaatactgctcatattcattggaacaagttggaaattgcagttcctgcattcttgattattttagggatgcctcttacttactcaatttcagacggtttatcatggggcatgatcacctaccctatctgtatgcttgctgctaagcgtggcaaggaagtcacaccgatgatgtgggtactgtttgtagtattcctgatcttcctgtgggtactgaacttttagatgaaaaagaatagataaagaaaaggactaagttcgaatttgaacttggtcctttttgtgtattcactaacattactttttattcttacccggatttaaaattgaagtgcaacactaagtgttaaacaaaaaggccatgaagacctaaacttgaagtgacgaaaaatcaagaaaggaagatctttatgaccaattcaaattctagcatttctaagcactatcatcaattaaccagcgtacaacgtggacaaattcaagcaatgctggattccggcataacttcccgtactgttatcgctcaagaagtcggctgccataagtcgacaatcagtcgcgaaatcaaacgcggaagtgtcctgcaaagagacagcagctatttattgtatgagcactattacgctgatactgcacagatttattatgagaagcgtcgcaaaaactgctatcagcgcaatccattgaagcattatgctgtctttttgagaatgctctccagacgctttaaagctaaatttgatgccaccagcatcgatgagttcgttggtgaattcaaaaggactatgccaggctacccttgtcccagcacaccaaccgtctatcgctatattgatcagggcttgctggacataagcaatattgatctgcctatgaagctcaaaagacgcaggaacaagcgtcatcacagccatggcggtcacgctttgcacaagaagcatcttggcaattccattgaacagcgtcctaaagagattgaagacagaaaagctccgctgcactgggaaggagatctggttaaaggcgtcagacgcaagaatcagcctgctttaatgactttgactgaaagaaccacacgctttgaagtagttatcaagattcctgactatcgggcaagcacatgccaaaggctgcttcaaaaggagattgacagacatcctgcctggtttaaatcaatcacgtttgacaatggctctgagtttgcggatatgaccaagatcaagggctgccagatttactttgctcacccatattctccatgggaaaggggcaccaatgagaactgcaatggtcttttgcgtcaattcttccctaagagcaagagcatgaaagacaagtcaaaagcttatgttcaacaggcaactgatgccattaaccacaaatatcgccgaatcctccaatatcacacagcagaggaactcttcaagcaatatatctcttcataacctaactgttgcacttaatttgacaattcaggctttttattcttatcgattataatcgataaaaacgtcaaaatcaccaatcttatcgagtataatcgataagattgcaaaaaaagagtcttttatcgactatactcgataaaggctcttttttatattacccaggaaatattaacgtacagtttctaaacaatatgattttttataataaaatgcgtcataacaggcgaattttaattggctttaaaatttcttttttctaaaaacaagatagcctaaaagggtaaaaagaactatatagcacaatgtaccaattaataattgtggattagagagatgggaggttaagtgataagttgcataattataatactgtgtcgttaaattgagcacattcaaaggattccaacgaataatatcaaccggtccaatattataatttaataaattagatgatagactgcttcccataaagataataattgcatttatcataataactacggtgtttgaattaatcatacaagacattaagcaaataaggctgattattaacgtagaggttataatatcaacgcctgttgttgaaagcatatttataaataatgactgattatacttataagtcgcagtccaaggaactatttttgctataagtggaacagtgttaaagaagatagttacaatcatagctatggcatgtagaaaaagattataaataaaaattgtaatgaactttgcaagatatactgttcctttattttgagcatgatatagtaatgtcaaaatcgttttgttttggaactccattgagaaaatagttgaacctactatgaccaaaatcaacataattatttggctagagttataacaagtcataactaacaaattgccatattgttttcccatggccaatcccataaaaatcataaaaagaatcataaaactgataatccaccaaggcagcttacggtgacctaacttatagaattcttgttttaattccgcacgcataaaagatcacctccgcctaaatagaccgctttttaaacagtaaagcgccaatccaaaagaaaactacagcgtacactaaattagcaataattaattctgaattagtcaaatgtgttacagtaaccatctcattattcgatagttgcgtaatgatattaatcatatttaatggattccaggctaaaattgatttcaaaccaggaaaagccgacattgctaaatttgaaagatctgaaccaagaaatccgattgctagtccgattatgatcactgttgcattattcctaatcaacaaaataagcattaaagagagggcaacgataaatattaaataaatcatcgttcctcccatatttaggaatagcgcattgattaagggatgtccatgataatcatcatgccaagaaaatttcgaaccaaccatcaaggtcttgagaataaacgaaaagattatcccaaataccagtaagatgaaactataaaaaactaaaacaatgaacttagctgtataaagaatggacttatgtgatgttttgtagagtaaggttgccatagtattatttcgccactccattgcgatcatatcagaactaatagcaataatgatgataatagcccattgtcctgcaccgaatccttgagataagagtgagggcgtcattttataacttgtaccaactgtatacaacattagtactaataaaacgagaatcccatacaatggaatcttgcgatgagcaaatttatagaattcgtgtgagagattaattttcattattatctcccccttgttcttgccgtaagatgttgacaatcttctgttctaaagttaagccagttggagccaaatattctatccagatttcattatcaaacagtagcttttgaattttatctatatctttatgatcaactattacagcatcatcttgtctatcaaaaggaattttagcttgttgtagcaaattggtagtttgctttatatcagttgtttttaatttagattttggatttttttcttgagtgaatttgctcataggtgaatttataataattctaccgtgattaataatgattaccgatgtcattactttttgtaattcacttaagacgtgactggaaattaagaaggctgtaccacgtgcagcgtattcatgtatcagttttcgaattaagattgtagcttcaatatccaaaccattcataggttcgtcgagaataaccagttgcggattatttaacaaagccaaagctattcctagtttttgcttcattccaactgagtagtcttttgcctttcgatcaatataatctttcatccctaatcgattaatcagtttatccataccacttaagtctttagcatagagctttaaattatcatatccagacagaaaaggataaataacaggcttttcaattaaagcaccaacagattgtagtgctaaatgatctttaagagtaatttcgtgatcattaaaactaattgaaccagtgaatttagttaatcctagcaaagttttcataatggtggttttgcctgctccgttatgaccaataagtcctacaatttcaccaggtgaaattgtaaaagatgcatctctaataatctctttgtgaccataaaaaatatttatattgttaacttttagcatgctatcctatctcctttaactccggattagacagagagttaaatcacttttctaattaaagtacctatattaaagtctagtatcctttcctgaattgtcaaattaagtgcaacagtgtaagtgtcaatgtttttgcggtagcctttaaaccattagtctaaccttaatttcttaaatatttatatgacttaaatttctgcttagcttgcttaaataactattgccagctacctgtgcggttaatgcgccatgctggatgcctaaatgaacttcatgacgcttctttaagctgtcacgggccgctgcttttaattcctgttcagtcaatacagttatttctgaatcttcaaactcgctgctaagccaaaattccagctctcgattcttgatgcagcttaagatcctaagcatgccttctgctccagattttgaccatttcttgccttgccccttaacacggtaggtatacttgcggtggttgctctcgcagcagccaatggctttagtcacagtcagttttcgtttcttaaacggcttaatatcgtcccaatgacgatcaatataattccttaggcgccccagataatcatgattgagctcggtattcaattcatcaattagtcggctttctgcagtggttaggatagttttaactttgtcatagctgtatttgtattccaaagcagaaatcagcttgccttgcaggtcaggcgcaaaatatagcctttctttgattttcttatttaggtgaaagacatccaagaaatgctcatgacgcttgcatagccctacaatgtcatcgaagtctgttttggcatatccagcaccgccatcggcgttgctaagaattacagtatcagaaagatcataagtattggccaggtactccttggcttcgttcagcgcatcaagtcggcttaaagaaacaaattccttggcattgattcgctttctgcgtttcttgcttatattgacaatgccttcacagacctgatagcgatgaaattccaaccggcttttagtgcctttgatcaccacgccatcgccttcaagatacaaaactgggacctttttcttagtgcctgcggcatcatatcttgaatctgcttcttggcccgctttaatatttttcccggccatttttaccaaattgcccacctgcatatggctaatattaaagccagacaggcaattgactgctagagcagtattgcgataagtggcaacgctgcttacttctaagatgtttttgactgctaaaatactgtagcgcttgtatttgtcaaagcccattaattcatccaagggataccttgcttgtttgcctgggcagacatatcttcttctgacatacctaacttcgccaaaagccatattgattgagcgctcattcttcttatcaatctgatagccctgtgctttaaccttggtaatcatttcatcatcaactttagctaaagccaaggccatgatttccttaatcaggtttaagaagaaacagattatttttctttcacgcttaatataattatcttcagactttataatatttgcgatttcagttacaattgaattcataaaagaccagcttctaatgtgttttttgttcttaacatcagactactggtctttttgtttgagctcaagtccaaattcaaaggacttgggcttttttaattatttattcaacttaccgtaaaaaattatacacttaggcaacagttaggctatgaagaaatatattgcttgaagagttcttctgctgtctgatattggaggattcggcgatatttgtggttaatggcattggttgcctgttgaacataagcttttgacttgtctttcatgctcttgcccttagggaagaattgacgcaaaagaccattgcagttctcatttgtgcctctttcccaaggagaatatggatgagcaaagtagatctgacatcctttgattttggtcatatccgcaaactcagaaccattgtcaaacgtaattgatttaaaccaattaggatgtctgtcaatctccttttgaagcagtctttgacaagtactggcccgatagtcaggaattttgataacaacctcaaaacgagtggttctttcagtcagtgtcattaaggcaggttgatttttacgtctgacgcctttaaccaaatcgccttcccagtgcagggaaacttttctgttttcaacttctttaggccgctgttcaatcgaattgccaagattctttttatgcggagcatggccaccatgactatgatggcgtttgtttctgcgtcttttaagcttcattggcaggtcgatattgcttatatccagcaatccttgatcaatataacgatagacagtgggcgtgctaggacatggataatttggcataatcctgtgaaattcaccaacgaattcatcaatgctagtggcatcaaatttggctttaaagcgtctgcttagcattctgaaaaagacggcatagtgttgcagtggattacgcttatagcagtttctgcggcgcttttcatgataaatttgtgcagtaatagtgctcatacaagacatagctgctgtctctttgcaggacactgcctcgtctaatttcacggctgatagttgatttatgacagcctacttcttgagcgatagcagtgcaggaggttatgccagaatcaagcagagcttgaatttgtccacgttgttcgctgttcaattgatgataatgcttggaaatgctagaatttgagttggtcatgaagatcttcctttcttgatttttggtcacttcaagtttaggtcttcatggcctttttgtttaacacttagtgttgcacttcaattttaaatccgggtctagtatccttttaataaatattttttactatgttcacatatgaacaataaatttaagattatctctaataaaaccgattttaggatttttttgaataaatttgctttatttgtttaaatgcagtttcaaaaccatcttttagagtattcaagccctgcagttctaaagcggcccacatcaaccgtaaattgcgatcatcatttgtttccaaaaaatttaacataaaatgcatgtatttgtatcttattttttcaaaagcaaacctgtctgtaatatctaagccagaaattattgcatctaatctttttgccttctttagatcttttttaataagaatatattctgcattaatcaaagtattaaaatagctgtagaaaatttcgaaactgtcaaatcttttgtgtaaatagatctttctcgtaaattgattttttaattatttatttaatcaaagtaggattctaaggtgtcctgaacctgaccaaagcctttatgaattcgattgaaataacggtcattgtagctcattgcctgaatgccaataaaagcatcaagcgactgttcagttggaaactctgccttaggcttagctttgcgcttgatcacattgttaaatgattcaatcatgttagtcgaataaattgaagctctgatctgcttgggatagttataaaagaccagcagatctggttctatgtctttcaagcttctgataacatggctgtaaaccttgccccatttggtatagaagtcatgcaggacagctgtggcttcttctttgtttgtctgttgatgcacctgtttgaattcgttcatgatcttttcacgatcgtcgacgcgtactttagcgcagatattgcgcatgacatgaaccaaacagcgttgaaaatgagctttaggataagtcctggccaaggctgttttcatgccaacaacaccatcagaaagaaaaagctcaacttgctttaagcctcgggatttcatgttttgaagcatatctgtccagacttcaatgttctcgctaggcgcaatgcggtagtcaatgacctccttgtgcctattaggcttgatgccaatggcaatatagactgcttcacgctcaaatgtttctcggcgcaaaggaaggtatgtcgcatccaaatagacgcagaaaaacttgtcgcttagcttgcgtttgtggtaagcctcaacctttggaatcatctgcttggaaatatttgatacctgagctggactgtaatggctgccatacatcttttcaattagatcggctatttccctggtggtcacgcccttggagtaaagcttgataatcatgctttccaagatatccgagtgctgcttgtagccaggcagcgtgtgctgatgaaattgaccgttgcgatcccgaggcacttgcacttcaattgggccaaattgcgtatcaactttgcggaaataagcaccatttctagagttgccagtattccagccatttctggcatagggatcatagcccagaaaggcagtcaattcagcttctaacaagttattaacagcctgttgtagctctttgcgcaataaatcatttattttgtctggattgaatagagcttgagcaaaatctttggtaaaatcattcatgaaggagttcttctttctgtatgtgtttttttgttcaaaccaatcatacgagaaaggaactcctttttctaatgtttaaagaaataaatttaaggaatcattcatccttacacaaactattttacagtctcaaaatttcatttccaaatcgttattatttttaaaatagaaaactagtgaaaaagataaactataaatagttcttgggctaataagattctgagtattaccaaagaagtacacatcatcgtaataccaaacttcatctccagataaaatttttgaaaagtacatcgataatctctttttatagttatctgtaaaaatatccactcctgtaagatcgtaataagcattacaataaatggctgcttttaaaaaagttcgtttatcgaaactgtcattttcaacttctgataacaattttttagattgcgtttttaagtaattaatatcattactttcatatgcttttgaaacttctaaagttatattttttagataattcgaaatattattattaaagaaatctattttttggacatgaattacttcgagtagtttgaatactttttcaatatctaaacctgcttcgcctctttcccatctttctaattttgaacgagaaatacctactgcttccgcagctttactacttgaaattttggttgcctttcttaattttctaaattttctaccatatgtttctttcataacccactcctagttacgttcacaaataccttcaaaataatgatccagataaaggactagttttacctccttaatgatgccttaatgcaataaaaaatcaaactcataaatattacctaaattttcatttagagctactaaaaaagcctaataccatcatcaagggtattaggtctttattacctaggaaatactaacgtacagtttccaaacaatatgattttttatgacagtttgggcaacgcaattttctagtatgtggcgtgtgtgccgcaaacataaagcttttaagttctggaacaaatttgtaatcgcaattaggacaaatatatgccactttttgataataatttttaagtaacacgaatgacattgcaatcaagcttactactaaaatagctaccgaaatataggctgcagtgttcatcttattgatgatacagtacgcaataaatgccataccgaccaattcaacagtgatttctactgctgacaatttccacattgaacgtgttacctctttgtatctagtttcattattcatgattttcgtaatgtcagtaacttccgcaatattattgggtttacttagaaccttttgtagttggataattttcttgttttgctcttctaatttttgcgtttctgctttatttctttttagttgatcttcaagcaaaagatcgattaatttatcaccatttttatcttctagtattttttgaatatcctttaacgaaaagccaagctcctttaaaaagatgattaattttaattgttttacctgctcatcagaatataaacgatagccactttcactaactcgactgggtttgaccaaacctttttgatcatagtaacgaatggttctagtggttatgtttaacttctttgctagatctccgattgtgtattctgacattactttctcacctcacaacttaaatatacgggtttacgctacgtcagagtcaagaataagctaaattttccgtaaaaaacttcaaaaagcaaatattttgctcttttcctattgaaattattaacattaactgtataattttaagtgaatgttcactttatacaaatttcggaggactaaatgaacgcaatcagtaatttctttcatttaaaggagaacaatacctcctttaagaccgagcttttagccggtttgactacttttgtaagtatgtcatacattctgttcgttaacccaaacgtcctaggtgccagcggtatggataaaggtgctctattcaccgttactgcattgtcggctgcctttacctgtatcgtaatggggcttatcgctaactacccaattgcttccgcaccaactttgggcttaaacgccttctttacctatactgtttgtttaggcatgaaggttaagtggcaaactgctttagcagctgttttcgttgcatcaattctgttcattttgttaactgtctttaaggtacgtgaaatgatcattgatgccatccctgccgatattaaatatgctatttccgcaggtatcggcttattcatcgcctttatcggtttgcaaggtggtaagttgattcaaaacagtgattctaccttagttactattggtagtctcaacaaccctactgtttggatcactatctttggtttaatcattactattttcttaatgattgccagagttccaggtgccatcttcatcggaatgatcgccgctgctgtttttggcatagtgactggtcaaattcccatgcctaaaggcgttatctcttcagttccaagcattgctccaacttttggtcaagcagtcttccatattggcgatattaataccgttcaaatgtggatcgttgtctttacattcttacttgttactttctttgataccactggtaccttaattggtttggttcaacaagcaggtctgatgaaggacaacaagatgccacgtgctggtgaagctctagcagctgattccagtggtatgttggtcggttctgttcttggtacctcacctgtcggtgcctttgttgaatcaagtgccgggatcgctgttggtgggcgtaccggtttaactgccgtttgggttggtattttcttccttatttcaactatcttcagtccaattttgagtgttttcactacccaagttacggcaccagctttaattattgttggagtattaatggccgaaaacttggcacacgttcactggactaatcttgaaattgccatcccatgtttcttaatcgcattgggaatgcctcttacatactctatttcagacggacttggctggggtttgattgtctaccctgtatcaatgatcgcagccaagcgtttcaaagaaatcacgccaatgatgtggattttgtttattgttttcgtaatctacttcgttgttttaaatgtaaaataattctatcttataacccccttatcttacttttacattaatatataccctcacgcgtggtgctagttaaatcgttctagacaataagccaaattataagctaaaattgcaatttccaaccggctttgaaagcctatcagactacgtgctcgattgttctcggcattgtaataggtcagaagcgaaaagtcgctttcaattgttctgcgaatagccatcaattgatgatcattgtgctttttagctcctgtcatatttttacgatatggtgtccaaagttcgtaacccatttgttttagctgttgatgcagttctttgcctaaatagccttcgtcgccaagaagatagtaattagatggatgggtattttctatcagttcaactgtctccctggcatcatgaactgatgcctttgttacgacataatcaagaatgtaaccgtcatcgctaacaatggcatgaactttgaaaccatagaagtaaattttcttggtggccttataaccaatgttggcataaccgcgaaaaattttagcacgatagtttcgaattggttggcaaacaggtaccggaaagctgtcaatgatcaagaactgtccattcaggtcaacctttttattcatttcttgccgtatctgataaatcaattgcaatagctgacgtgaacgccgattaaaacgtgagtgtgataaacaattgaaacattcacagaatcttctttgtgattcaattcctgtcttagcttgccagataagtaaagccaaaatcagactgtccgtagttttaatttgatcaatatttcgccgatgagtaaactcagccggtgcatacaaacgataccagtgccgacaaattatcactaaatctttaaaactaacttgtaaatggtggctaaaacgcttaagcttaaggcagttcaatcagatcagactcttttctattattactatttacaagtcgagtctaacaagattggacttttttattaactaaaacgatttaactagcaccacgcgtataccctcatctaaccaagtagcatgtctacttggtttttatgctaaaaagatgtctgttaatagtatggatgatgacagcagattctattagatgatataataatcaaagaaaggctgtgactaaaatgaaatcatataaaaaaattcaagctaatgttgactcctcactagcacttcaagcagaaggaatttttcaagatatagggctcaataccactaccgcaataaatgtgttcttaaagaaagttgtggcaactggtggtatcccatttgaattaaaagaaactcctgaacaaaaagcctcaagagaattaattcaaagcatctcaaaaattccccacaaagaagctaaaaccaaaaaggaaattgaggattggctagatgaggactaatgatattgtagatatttatgttgcttacattgataagcctggaggaaaaaataggcctgtattaataattaaattactaaacagtaaagcttggctgctaaaaatcacttcaaaatataaagaaaaaagtgaaaatatccgaaagcattactttcccatttttgactggaaaaaatataatttagataaaccatcatacattgatactaaaaattatttaatagttactattagtgatttaaatatcgaaaaataccgaggccatttctcaatagcagatttacgcaaattaaaagattttattgacgaaaattcaaactaagaattaaactatatgttttagttcctaaacacaatctcaaatatgagattgtgtttttatttatccaaatggcatcttttgataatcatttgacgccttatgatgttcggattcttctaaattgccgctatactattttcaacaaatcgagttatgaaagatttatttaggaggaattcattatgacaactcaagaaggaaaaactgctttaattactggttcatacggtgggcttggtacccaattcgttaacattcatgcttcacacgggggtgacctaatcctagttggtcgcaatgctaagaaattagccgatcaacaaaaagaagcccgtagaaagtacaacgtaacggcgcatattatcgatgttgatctctcacaaccagatgctgcgcaaaagatctatgatacttgcaaaaagaacggttggactattgactacttaatcaacaatgctggctttggtggtcaaggcgaattcattaaaagaagtatggaacaagacatgtccatgatcgccgttaacattgaaacgcctactcgtttaactaaattatttttacctgacttcgtaaaacgcggccgttatgcctggcccacttcaagccgtttactacgctactaaagcatacgttacaagctggtcaaatgcgttatggcgtgaagtacaaggcacaggcgttacggtaagctgcttaatgcctagcgctatgcaaaccggttttatcagtcgtggtgatttgagttcaactcaattattcgcccatgcggttagtccataaggtgttgcaaaagctgggtatgaagaaatgattgaaggcaagcttaacattaccgctggtttaactgcagcccaaaaaccattcatgaaattggaaccaatgttacctaagaagatgctcatgaacaatgtttataagatgcaagaacaaggtagtagaaagtaatcaacttatcttataatatggatcaaaaggatggtatttgaatgaatcactttattttagatggtcgctatgaagacctactctcttttaacgttgaagaagcacttaaaaaagccaatattcctgaagattgtttcaaaaaactccatccttcaatgagtgaacaacaatactacaattttatggcggctattggtgatcagattagtgatccattcactccaattgaaattgcaactacaaatccaattgaatctttctctccaccaatttttgcggcatatagtagccgtaacggagatatttttatcaagcgtctagccaaatataaaaagctgattggcccattatcttttaaaattgatgaggatagcaagcagctctctattaccctaactccaagtaatcagcaatattccctaccctcttttctagttttatcagaatttgcatttttagtgggacttttgcgcaagacgaccaaagaagctatttccccgctgaagatcacaatgacatcccccgtcaatgatgagcaggtcattaacttctttggctgcaaaatcgaatcgggtaaacgcaacaccatcacttttgccaaaaaagacttgcaggtcaattttattagttataactaagcaatgtgggattatttcaagcctgaattaactaaacgcttatctgaattatccgttgatgattcaactagtgctagagtacgtagcatattgaccgaattacttcctaatggtgaatttacaattgacgatgtagctaaaaagttaggttattctaaacagactttacagagaaagttgagtagcgaaaacactacttttcaaaaacaactgaactccacccgagaagttttagcgctaaattatttacaaaacaccgatatgacaactagcgatattgcttaccttctaggctatcaggaatttaattcgttcttacgtgccttcagcatctggaaaggcataagcattagcgaatatcgtgaaaaaatgaataaataataaaaagcagatatattttctgtttttttactttataaaggaaataatatgagatttttgctataatttactttataaaggaaataatatgaaaattgctaaaaatttactttatgaaggaaataatatgcagttaaatttaattaaccgcccacagtatttaaatcaattacttcaatttcaaaatacagaattcatcaaagtactgacgggagtacgaagatcaggcaaatcttatattttaatgctttatcgtgaatatttactcaaacacaacataaatgaacatcaaatcatttatatttcttttgaagactttgataatatagatctttatgaacctaaaaagctttattcatacttaaaagaacgaattattagtgaccaaagaatgtacattctacttgatgaaatccaatatgtatcagattggcaaaaagtagtaaatagccttcgacttaatcctctacttgatatcacaattactggcagtaattccaatctattaagtggagaattagcaaccttactatcaggaagatatgtagaaatacatgtttatcctctttcttttaaagaaatgctagattttaaacatatttctgaaccatcagagcgtcagattgataacttatatgatgaatacattaaatatggtggtttccccgcggtagtgttagcaaaagaagaattaaaacaaactattctttctggaatttacaataccattattgtcaatgatatcggctacaaaaatggattaagagaaccagaattagttgcattagtagctaaatatctagcagattcgattggtcaattaattaatccgaacaagattgtaaatacactaaaatcagcaaattttgatatctcttataacgctgtgcagcgttaccttaaatattttgaagaagcatatcttttttataaatctagtcgttatgatattagagggagaaagattctttctactcaaggtaagtattacattgtagatactggtttgcgtacccaagctttaggagaaagaaataatgaccgcggtagtgttttagaaaatatagtttatgtcgaattacttcgccggggctacacagttcaaattggtaaattagataataaagaaattgatttcatcgttttcaaggtaaatgataaacaatatattcaagtaacctaccagcttccagaaaattctactagagaaactgataatttacttcaaattccaaataactacaaaaaaatagtcatcactggccgatatgaaaatgaagaaatgatttccggtattccaataatcaatattaaagattggttattaagctctaaaaactgatcaaaataggatcgactaactcatgtcgatcctatttttaaattaaattatgttttttacaataagtaaaaattccgtcatcttgcacgctgccacagatgtcatcagcaatttccttcacatcgtctgttgcgttccccattgcaacgccgtgaccaacagtctttaacatttcaatatcgttgccgccatcaccaaaggctattgcttcgctcacagggatttgataataatctaacactttttcaattgctacacccttactaccagtagctggaataatatctgctgctctatcccaccaagctgttaccttagcattttgcgtattagctacaagtccgtcataatctttttcacgacagcctaccattatttgataaaccgtatcctgatcgacaaccacatcaaaatctggcgccactctcaaatccgttccaccaatagcaaagtattcctttaaatcctcatcaacaccattagctgcaatccgtgttttggtagctacagctaacggccgatttattttctgagcattttgaatcatatgcaagacatctccttgccttaacggattatcaaaaacaatgtcttgatcgttatagcagtaagaaccattaaaagttaaatatgcatcaaaatctacacccaacttaggcagttgcactggtggtctgcctgatgcaatacaaatcataatgccgttgtcttgtaaagcatgcagtgtctctagcattttaggtgtaattgattttttcttttcaattaaagtaccatctatatcaaaaaatattatcttaggtttgctcattatttttaccttctaaagaattttctactaattattatactttaaccgatatttcccaggaaatattaaaattgagctctcttcctcaacatctgtgctaaactagatacaattagtttctttaaaagttaatagttacggaggaatttttaaatgcagacattggaaaaagtctttcatttacaagatgctcataccactgttaaacgtgagttaatcgctgctttaaccacttttgtcagtctctcctacatcttattcgttaacccaaacattttgcacgcagctggtatccctaaaggtgccgcttttactgtaacagctcttgccacagcagttgggtgttttttaatgggttttattgctaattatccgattgccttagctccaaccttaggtagcggtgcctttttcgcttataacgtatgtgttgggatgcatatttcttgggaaacagctttggctgcagtccttgttgcttcagttttattcattttaattactgtctttaaattacgcgaattagtggttaatgccattccacaagatatgaagtatgctatttcagcaggaattgggttattcatcgcttttattggcttaaaaaatggtcaattaattgttaacagcgattcaactttagttactctgggaaaatttagtactccagcagtttggatcacattatttggcttaattttgactgttgtattaatggcattaaacgtgcctggttctatctttattggaatgattgttactgccatcttcggtatgatcattggtcaaattccattaccacataacatcgtttctggtgccccaagtattgcaccaaccttcggccaagcggtttttcacattaaagatattaatacagctcaactttggatggttgtactaactttcttattagttaccttctttgatactgctggtactttaattggaatgactgaacaagccggtatggttgacaaggatggcaagattccacggatcggtcgtgcttttttggctgattcaactgctatggttgaaggtgcagtctttggtactgctccacttggaacttctgttgaatcaagtgccggaattgccatgggtggtcgtactggtttgactgctatctttgttggtattttcttcattatcagtatgattttcagcccattgttacaagtaattccaactactgtaacggctcctgctttaattatcgttggtgtactgatggccagcaacttaaagaaaatcgattgggaaaagttcgaaattgcctttcctgcttttcttaccgttgtagggatgccactgacttactcaatttcagatggtttggcattaggcttgattgcctacccaattaccatgattgcttctaagcgttataaggaagttagtcctatgatgtatatcctgttcgtagtatttatcatctttttcttagttacgaatttataaaaagaatgctaaagataagcagtttgaagctgcttattttttattgacttgatttttattttgtactactgtaataaatatataagacagtttttatgggagaagaaaaatgagactgtaaaatagtttgtgtaaggatgaatgattccttaaatttatttctttaaacattagaaaaaggagttcctttctcgtatgattggtttgaacaaaaaacacatacagaaagaagaactccttcatgaatgattttaccaaaaatatggctcaagcactattcgatcaagacaaagttaatgattttttgcgcaaggaaattcaaactgcagttaatcaattgcttaaagttgaattgactgcctttctgggctatgatccctatgccagaaatggctggaatactggcaactctagaaatggtgcttatttccgcaaagttgatacgcaatttggcccaattgaagtgcaagtgcctcgggatcgcaacggtcaatttcatcagcacacgctgcctgactacaagcagcactcggatatcttggaaagcatgattatcaagctttactccaagggcgtgaccaccagggaaatagccgatctaattgaaaagatgtatggcagccattatagtccagctcaggtatcaaatatttccaagcagatgctccccaaggttgaggcttatcacaagcgcaagctaagcgacaagtttttctgtgtctatttggatgcgacataccttcctttgcgccgagaaacgtttgagcgtgaagcagtatatattgccattggcattaaacctaatggacataaggaagtcattgactactgcattgctcctagtgagaacattgaagtctggacagatatgcttcaaaacatgaaggccagaggcttgaagcaagttgaactctttctttctgatggtgttgttggcatgaaaacagccttggccaggacttatcctaaagctcattttcaacgctgtttggttcatgtcatgcgcaatatctgcgctaaagtacgcgtcgacgatcgtgaaaagatcatgaacgaattcaaacaggtgcatcaacagacaaacaaagaagaagccacagctgtcctgcatgacttctataccaaatggggcaaggtttacagccatgttatcagaagcttgaaagacatagaaccagatctgctggtcttttataactatcccaagcagatcagagcttcaatttattcgactaacatgattgaatcatttaacaatgtgatcaagcgcaaagctaagcctaaagcagagttcccaaatgaacagtcgcttgatacttttattggcattcaagcaatgagctacaacgaacgctatttcaatcgaatccacaaaggctttggtcaggttcaggataccttagaatcctactttgattaaataaaagattaaaaaatcaatttacgagaaagaactatttacacaaaagatttgacagtttcagaaaaatgaaaatcaaaaaagtactactgaccacgtctttactcacgattagtttgattactctatcgggatgtagtttccacctgtttaccaacaagaattccggtcctacaatcaaacgaactttgtcctctaagaaattcaattcacttaaggtagccagtgacattactgatgttgaattacatgcaagtaatcaatacaaagttatctatcatgggctcaagcgtttcaaacctagcgttaatgtgaaaaatggtcagttaaagatcactcaaactagtaatggtgtttcttataacatcaaagaaggcaatacagtggcaatctacctacctgccaaagaattacaaaatatcaatattaatctttctgatggcgatatcgatgctgatggcaaggttcaagcaaaaaatgtcaaacttcacagtgacgatggtgatgtcaactttgacgatttaagaattagctctggcaaaattacctcagatgacggcgatatttcagtttctaatctacttactagaaaaggcgccacagttgaatcagatgatggtgacattcgtattagaaagagcaatgccagtggttaccgcctaacttctgacgacggtgacgtcacattcaagggagatacttctgataatgatgacggtggttcttactacaaaaatactaagagttctaacctgctctctgctcacagtgatgacggcgacgtcaacgttaactaaatttcgtcataaggcgataagtttcacatgaaacaaaaaatcaatgcatcattgataatgcattgattttttacttttttcctcattcatagcataaacacgactttacaagattatttaagtttctattgaaatagacataattttaatacgaaaaagataagactaaattctacttttccattaaaaaatatttaccaattttccattttctaagtcaaaatgatgcgtaaatttcttcatcgtcgttgatgaaatatggtggtcaatttcaattactgttaatggtgaattcaaaaagacattatgaatttgctcagcagtttgcggatcaagtgaagcagttccttcatcaactactaaaatttctctttggaagagaaaagcacgcgctaattcaattctctttctttccccacctgaaagattatgcccattttcttcaattacggtatctaagccatgtttttgaaggtaattagttaatcctgcttgttgagccgcagccacgatttgcttttgatcaaattgtttaccaagagttaaattaaagcgtaaagtcacattaaaaatttgcgaagattgttgaacttcactaaaaatttgcgtttcaacagcctgatcattaaccaaaactcttcccttctgcggagataatttacccattaacaccttaagtaaagtagatttaccttcaccagactttccggttaacagaattttatctcctttattaacacataaactcacattattaagcactggactatcagcttgatagccgaaagttacattgtacatatttaattgcttaaatttgactggagcttcatcttgcttagtcgttaaaggcttgaaagataacaacttagcggtcattggtttagtagcagcaatctgattacgaatactattaatactaaagaaactatttacaatccaagcgctagagtattgaacggcaacaaaagaagccaaagcaatgtgtccttgaattaccataataatgccgattccaattggtaagaagtctagtgagtaagctaataaatcaacgtaaaaatcacttttagcaattgtatcgtcacgttcacgtttattctcaacagaatttttaattactttactacccttctttacaaatagagataatacattgtaatttaaaaccgtattgatatttttgagtaaatccgacataaacgttacataactacctgttgatttactccaattggatgactgattggctgttttcttgctaaacaaactaggaataaggcttgaaagactggcaaaagcaacaaagactaatgtcaggactacactatttatcagcgcaatagtaacgataccaacaattttaaccacagtagatactagtgaaaataactgtctaaagtacttttcttcaatcaggttaagatcattattaatgaaagaaattcgattagaaatttctttttctcctgtttttacaaaatccgtctgcatcagatactcacgaacttcttgattaaatagtgctacattacgattaattactcgattatttaagtattctacaattacaagtaagatttgcaatactgtaattacgataatcattctcaccgtatttggaatacttttacctgtaattaacgcaaaaatttcggagtatgaccatgtgctaaaagacaaagataatccgcttaaacatgacagaataatactgagcgaaaaccatttgaggtcaataaactttttcataaatgaatctccctttcaattaagttggattcattatctgctttagttcacgataaaaatagctttctgcaaaagtgatcttcaatctgcatatatgcagattattctggaagaatagacagaatattttctaaattacttgccttgatcaatttcttaatagctaatacctgctctgtatctccagcaaaatagcattgataaaaatgaccaatgattttatataagactaaagatggcgtttgacttaattgcccaagtaaataaataggctctttattatcttttacaaatttattttcagcacaagtatataaataattcacacaaatagtggcaattgttgtttgcattttttctgtctgctcagacattttatcattataagtagtgaaaattttttgaaagaaaaaagcaaaatcgtcatgagtaaagatagaggtaccaaaattggctaacaaatctaaactaaatttatcttgaagccaattgtcgcctgcaaacaagcgttgcagtactatatttttatctttgacatcaaatttacgttttccttctagcaaggtaagaatcaacttagctttgattttcagaagatcatgatgaggcagttgttgaatttctgttaccaattttctaacttggttaaagtcttgattataataagcagtctgtaattgatcacctaaattgttttcatcgtcagcttgtgcgactgaattttgcttaaagaattcatcaaatgaaattttatttttctgcaaaattgccattaagtccttagctgatatttcatgcaatccgcgctcaatcttagaataatgggcaggtgataaaattcctgctacaaattgttcttgcgtcagtccccgcgattggcgcgctttttttaatgctgtgttaatttccatagctgtttttatttcaatttacggtcccttttagatacaaaccaaattgtcccatcagaagttgcccagtgtccatcagaagttttatgaaatttcagcgtcagtttcttactgtgtagtgtccagctatttttaccttccattgtgacacggacccggcctaatttttctgaatttattttgttattgtagtctttgggatcatatgaattatgcccatatactttataaattgcttttgctgccgcagtatttggcttaatgtatttataagtaccagatgcatcagtcttaaaaactgggctggatgcatcgatttgaccactatttttccccagagctatgttcaccaacatgccaagatgattttccattacagaatctgtttgatggggatcataggttgtaagatttttattagcaaactgttctggaatagtttgctaattgcgataaaacaaccagccaccgactgccagaactacgactactacaacagttatgattgtagctttctttttcataaaggatcacctgttatctatcagcttttttctgaaaagtaattaatccgtgtgaaactaatctaacagttccgccataataaactacccaacgtactttgccattactgtactcttcatacattctctcccgctgaagatatccattatatgtaccatcattataaggaatttccatcggagtatctacagcaccatcataagcgccataacgcgtcttatgccatgggcctgttctcttaactccatgaacttttttagttaacggtagtttttgaacgttttgaactgaatctgtactagattccgcagcagatacaacagcagtattagtggttgcaaacagagcagttgctgagaataacactaaagttgcttttcttaatttcatatctaacaccttatacctttcttttattgtttattttcattacctagttgttcattatcattgacaacaaaatttgtcatcattttctttttacttgctaatgtaggaattgggtagcttttaagtttagtattatacaaatagccaccgtacataattcctgttggattatgccccattggaacagtgtacatcttttccagatatcctctaaatacctcattgcctcttcttacagtgtaataaacataagtaccctgatcatgatagtattgacgttgataccagatatgttcaacaaatccttttgattcagtgctttgtgttgcagcttgtacatggtttgattgaaccaaagctgaagttgaaactgatactagtgataaagctaatgctgctttagctgttaaagttaaaattttcttatttcttttcataactttaacctactctttttttcttttcttgctttaattactacctaatccagacggaataggaacccatggacccatatttttctctcctttcttatttatttttcattaattttactttcactactaagaactgttcagaaattgtcaaagatgacaattttctacaataaaattcttaatcaaatgagacattccattacttttcataaattcaataatctgatctacttcttcatttttgccatcaaaacaataatggtaataattggcaactattttagcaaaagcattacgtggaatttctggcaatttagaaatgaaatcgtaaattagatttaaatcaattttccttctttgtacgtatacattagccaaataattaatagctattgctgacattatttcttgtagctgaccagacagattagatacattatggcgatacgttctaaatattgaattaatcaaaaagtccatatcttctggggcatatatcatcatagtcattgcaaaaatttgtagagtagattcactccactcatcagaatcaaagacaatttgtctaacttgtcgtttaatattctcagatatttgatcaatttgtttctttaaagatgctattgaaaataccactaaagcataaagattaaatatattctgactttgatttttatattttccaatttcaattttcaaatcttcaagtcgttcgatctgctgatgataatatgcatcttctaattgcttttgccagatcaaatttttgtgagcaagatcattttcactatcttcattttctattcgctctaaaaatatagaagcttgcaatccatgttgctttaacaaatcaattaaatcctgagtctgaatatcatttaatccacgttcaatttttgaatagtaagatgttgataacacatcccccgccatttcagtttgtgataatttcatactttttcttgtttgttttaatgcttcaccaattgtcatatctttccctccctcgtattatcatatttttcattattgtataatgttttgttaattttgcaatagtttgtaaaacaaaagcattatttttatttttcaatcttttatgtttacaaatgtaaacttagcaagtagaataaaaaatgtgaagagatgaaaataaattatttaatttggaggttacggtcatggatgtaactaaaatcattatccttgttgtcgcaatcgccttgatcggctttatcctttggtggttcttcggcaaacatgacgaagctatcggtaaagcaagtgttaatcaaggcacacaagaagctaacatcgtcgttaacggcggttactctccttctaccattgttttaaaacaaggcgtaccagctaaggtgaattttgatatgcaagactctaccgcctgtttatctcatgtcgtctttgaacaacttggcgttgacaaagatttaactaagcaaaaagttactacagttgatattccgactgataagaaaggtacatataattttgcctgcgggatggatatgttccacggtaaagtcattgttaaataaggagtttacaaaatgagtattttttcaaagaatcaaactaaaaaagttgttgttaatgcagaaaatcatggttataaaccaaacacagttactttcaagcaaggtaaaccagctcaattaaagtttattccatcagataatatgggctgcatgaatgaagtagtctctaaagatttaaattttgaccaaaaattagatggtaaaaaagaagttacgattgacattccaactgacaagccaggtacttacacctacgcttgtggaatggatatgttccgcggaaaggttgttgttaaataatgaaactttcaaacattaagcgcttctggatctcatttattctagctattccaatgctaatccagatgttcgccatgccctttcactggatgatgccaggctataattggatcgcttttatcacgactacaatcattatggcgatttccgctgccccttactggagcagtgcttgggccgcttttaaacaccataacgctaatatgaacacattagtagccgtcggtacttctgtagcttacttttacagtatctttgctatgtttactggacgtgaagtctactttgaaagtgctgctttcgtcaccgtcttcgttttgctcggggatgcaatggaagaaaagatgcacaataatgcctcgaatgctttagctaaactaattgatctgcaagctaaagatgctgaagttgaacgtgatggcaaattcattaagttgccactagatcaagttaaagttggtgacatcattcgcgttaagcctggtgaaaaagtccctgtagatggcgtgattgttgacggttcatcgactcttgatgaatcaatggttacgggtgaaagtatgccagttactaagaaaaaaggcgacgatgttgttggctcaaccatcaatactaatgggacttttaccttcaaagcaactaaggtcggtagtgacacgatgctttcgcagattgttgatttagttaaaaaagctcaaaccagccatgcgccgattcaaaacctaactgataaaatatctaatatctttgtcccagtcgttttaattattgcaattattaccttcgtaatttggtatgttttcttaggcgcaacattggttaatgctatgctcttcgccgtttcagtagtcgtaattgcttgtccatgtgcactaggtttagcgacaccaactgctttaatggttggtactgcccgtagcgctaaaatgggcgttttaatcaagaacggtgaagttcttgaagaagttagcgacattgataccgttgtgtttgataagactggtacaattaccgttggtaagccacaagttactaatgttgtaggtgataaaaacaaggtcttaactattgcagctagtttggaagaaaattctgagcacccactagcaaccgctgtagttaaagctgctaaagaagcaaagactgaaattaagtctatacaaaactttgcagctattgaaggccgcggagttaaggcaaactatggcaatcaagaagcttttgttggtagcgatcgtttattagaagatatttctatttcccaggaaatgaaagatcaggctctccaacttcaaaaagaagcaaaaactgtagtctatgttggcctaggtaatgacatcattggcttaattgccattcaagatgtacctaaagcaagttctaagcaagcaattgcggaacttaaaaagcgtggtttaaagacggtgatgcttaccggtgacaatcaaaatgttgctgaagctattggccgtgaagtcggaatcgaccaagtaatcgccggtgttttaccaactgaaaaagccgctgagattaagaaattgcaggatgaaggcaataaagtagcctttgttggtgatggtattaacgacgcacctgcactgtctacagctgatgtcggcatcgccatgggatcaggtaccgatattgctattgaatctggtggcattgttctcgttcaaaatgacttaatgggcgtagttagagcgcttgagatctctaagaagactttcaacagaatcaaattaaacctcttctgggctcttatttacaacactattggtattccaattgcagcaggtttattcatggcctttggtctgcagcttagtcctgaacttgcaggtttagctatggccttctcttctgtttctgttgtaactagttcacttttattgaataaaacaaaaattgctggtgaaacagctcaagtttcaaagtaaaataattctccgaccggatattttaatccggttttctttttgtaaatttttcaatttgcgacttaaagtttcagcagtaatacccaaatatgatgctaagtctttcttttttaactttaattccacatttttactcccctgtttttgagctaagtcttgcaaataggccattaagcgttcctgagcatccattgaattgcgccgaatagagttagtttcgattgtaaccagctgctcgccaaaattattaagcaaattcaatgctaaatctggcgtctttttcaataacttttgaaaatcacgacgctcaatagaacaaacataagtatcttgtaaagcctgcacaaagttttcctgggcatgttcttgaaaaagattctgctgtccattagcatcgccttgattcagcacacctaatacggtctctttaccgtcttcgttgagattgtaaatcttggcactgccttgatccataaaaagcattccgttcttaccatcacctggttgtcgaataatactgccttttggaaaatattcttggtgcgttgaaattggtactagtttttctaacatttcatttggcaaatttttaaatatggctgctttgcgaatacaagccatgggtgaatgttgcataaaagcctcatttcttgatctaagtcaatttatttttatctgcatcttaatacaatgtatttaacaactcaagcagaaaggaaatattaatcatgactaaatacatcgcacatattgagcctttaaacgctaaaaaaattggtaccaaggcacacggtactgccacttttgaaaaaaaaggtgatcaactacatattcacgttgagatgtttgatactccagcaaatattgaacactgggaacatttccatggcttcccgaatggtcaaaaagctcatgtaccaactgcagctcaagacgttaaccatgatggctttattgatttaccagaaactgagccggtctcaggaactacaatggtgccacttgatgatgccccagaaaacatgaatattcctcatgatggttatcctgttgccgacagtaatggacattatgaatatgagattgatgtctcattaacaaagctacaaaagaaattcaaagctgcctttggtagcgataaactacaactagacaagcgtgtagtttacgttcatggtgtacctgcagatctggaattacctgatactgtaggtggttgcgtaatgagttatgatgcccatactaccttgccaatcgcagctggtgaaattgaaaaagcttaagttaaaagccattccttgtgaatggctttttgcatcctttcttattttttgatagcatagatatagattatgtaaaatatctaagaaaaggagatgttttataagtaggcttagatcctactcttatggagaataacgaaaaaattatccaagaaaagaaacgcgaaaaatttattaaaactaaaaagaattacaagcgtgcaccactaatgtcagttcacttaagagtgatgatggccgttatcttaggtcaaatcgcctgtggctattccctgggaattagtggtaccgctctttctaatgcagctaaatatatcaacattagtgacttctggactggattaattggggctggtgctttaattggccttgctggtagtcttttggtcggtcgactttcggataaaatcggtcgccgtaaactcttaatgtggaatatgtatatattagctgcttttttctacccaaagtcaagtattatcaatgatttaagaaaataaatttacttgttttaatgatgcgaataaggttaaagcaaataagagtttaaatttaagaaaaagcgaaagtaccacaaataagcctatgaatacttgtagtttttccataggttgcttatacttaagttgattatttgatttcagctaaagtcttttattttcggtggctatgttgtaatcatataattgatcatgtttgataagagcaaacattgtgcgtatcagtttatggactgatgcaatggcgattttcttatagccttgtctatttgaagatcgttttttcttgtcataataatcagttatatggcaaggctgcgtagcctttaccgtctccatttgagtaataactcgataaagtatttttctggcaatatgattgccatgcttggtaatgccaagagaactgtctttttcaccagattggtaccttcctggatcaatgccaacaaacgcatcaatttgagctgaagtgctaaaccgtcttagatcaccgagctctgctactaatctcactgctgtaattctagcaacccctgggatactcaaatagatggataaagcacgagcgtttactgctttagccagcttttccatgtagttaattacatagtcgcgttcttgctggagtgaaaacaaattagaaatgttcctttgaatagctctaacgataatactatctttggaatcataaggataagcttctctagcaaaagcgtataatcttgtggttaagtaccgtgccctttgttgtcctattccagaaatagaattaagcatttgagttacctgtgtctcattcttttctagaacatatccagcatgtgggaaaagactaacaagcgcccaataaattctgccagatggatgagacagtatttcttcaatttgtgggaaagtggattggaggttgcggtgcaattgatttttagtagtaactatactcctagtaagttcttcataatagcgactggcattctgaagttcatgatactctctgggctgtggatcacgcagcttttgcggggcattaaattgaattaaagccaggcgataagcatctaccttatcagttttattatggcgtaaattattgtccattagctttttcgctttaagcggattaagcttcaaatacttaatatgataatcctctaagaaagcttgcaggcttagagaataaacaccagtagcttcgaaaacaactaaaggagttatcaaatattggttcagttgctcataaagtttttgatagccaaaggaatcattagagattctaaaagattcgccttgtttgatccggtcattaaccacacaaactgtggaagatttactgctaacatcaataccgaaaataatttgtgattccataatataacctccgctgtgaagataaacctctttatcaacctattaattctaattttctaaacacggcatctaagtgcccacagacttcgaagagacttaagaataggtggtaaagcagtccgtttcttttacgacatcaagtgtctaaaaagctgaagacttgatttgctttatcttcactttctattttagacaaaataaaaagtgccagatcgtgaatccgtcgattcatgatccaacactaggttagtatgtttctttattacatctaataaccgctaattttagcttaacctttatcctccgtattggaattggtttaatgattgctgttgactatactgtagggaatgccttgttaaccgaatggctacctaagggcgaagacagcaaacgccagagtcatttattaatctattggacaattggttttattttgtcctatctagctggtagttttatcactggatttgatagttatacttggcaaataatcttagcaacaagtgcagtacctgcactagtaactgctatcttcagaagtcttttcccactccctgcttcaccaggctggctagcaagtaagggtaagattaagacggccaacaaggtcattcgtaagcacatgggacgcaaatggagattacctgcccgctttatgaagcggaataaaaagaaaacgcctagaaatatttcctgggcaattttattttccaagcaatatctgcgacgtactctagtaggtgggattttctatgcctgccaagccttctcatttttcggtattagtatcttcttgccaattttattacaaagcatgaatatcactagtggaaatatctcaggaattatctacaatggtgggatgttcattggtgtgctaatcggtacctggatctttaacaaggttagccgccgcttctatcttatcagtaattttctaatctcaggtctgctaatcggcattttagcaatagtacctaacttaaattcaatacttaaattaggtatttttacgttatttgcgattattttatcagctggtttgatcctagattatccttatccgactgaattatttgatctgaaggtacgagcaactggtgtaggtacttgtattacaatcagccgaatcggggctgccgcagggactttcttattgcccgtcttaactaatgtgggtggtgctagcctggcaatgctagtttgtgcgattgttttactctttgcctttatcgtttgcctcatctgggcaccagagacctcaccccaatttatgaaaaaataaaataattaatatgctacacaaaaagacagattacatatgatgcaatctgtcttttcttatttcttatcttttttcttcttgtccttagaatccttatttaataattcttctggatccttatgcttaggcgtcttctttggatctggtacagttgcaaagcgatcaagcatcttctgtaagttattagggttgtcaaaagttaatcccataaaacatcttcctttcgttttctcaattatattaaaatttcaattcaaatgacaataattttaacccttattatcaataaattgttgcatcttaatcatttctgaaccagccagatcaacactaattaaatcactataatcatgaacactagtatctcctaaaccatattcagttacaatttttaggtcgaagccactatcagagcgatcttcaattaagcctaaacgatcaggataatgataaattgaatcactaattttcactatttgatcttcgggccaattatcaataatttctgctggtgactgaatttcatcccgtaatttaactgaacgctccagcctgtccggatcaaaactaccattatttttttgccattgaactaaaaaattaaagaagagcaagcgctcggaatcttcagtaatatgcgttatatggctcctagcaatcactgcaattgattcaacctgccctaactcattgatgctctcgaataccagattatcatcgtcatacttgagtactttaccaatagcaaaactaccatattgatcatcaaaggtataatcaaaataaatttcaaccagatccaagtcgttagtgaattcttgcttctgtgattgccgcaaatattgggtaaataagcgattatcaatggcattagtatcgacacaaacaatatcgtcaagtggtataacggtggcataatgctctaaagttaattcattgcgttctaaaatacgcacctcttgctgatcaagttgagtaattaagccagtgtaagtagcacctgtattcacctcaaaagttgtaaagggttgcgcgtcagctacgttaatcagtaaatcatgcagattagtaaaatcccaggctaacactgtcttatttaattgctctaagttaaatgaatccttaacttgggtaatcatataatagcgtagattaggcgtatcgtcttcaatcttagctacttgatcttctttaataaagactattccacctaaattaccgccttgatcgactgattcaaaggtaatccagccatgatgttgcgtgataatgcggccaatatagtaagaatttgcatcaactaccgtaatacttgcatccccacctaagttatatttttcttgatcagccttaagcgtgatttgtacaagtttattcaatttttcgccccctcttttttcttccgtgaatttaattgtcgcctaatcattatttttctgcaagaaaaaagaagatggtttagccatcttctaatattgagttaattctgtagaattttggggctaacgaatattacttcttttgtgcagctgcctcagcttctgctgctgtgtttgaaggggttaacgaagtactgtttggatcaaaacgcacatcgcttgcttttacataaccatcagcaaattggacttcaccttgattactatagacagatttaccaactaagtgataaaacagttctgccttattttcacttggtacccagatgtaaagcaacttatttaccttgtatcttccaccttgttttctaacttgatcgcccttgaagtcaatcttgtttccgttagcatcatagatatcagttggcttaataaattgaattagtgattttttagtatgataataattttgaactggaatatctttagcagctttaacattgaaattataaatccaataatcagttcccttaatatgatagattgctaattcgttgtcatcgtcaccatctctaccagtatcagcacgtgtcccttgctctaaacgatccactgtaaacttatcaccttgttttgcgtattttcctgaaggctgaactgcatctttatcaggtacttcaacaaaaagagcagcacgtttatcagttacagtaacagtcgtttcttctgatttagttgtttgagacgaagaagaactagtgttgttatttgtattaacactaattacaggacctaaattataagacttaatgtactgtttattaggtccacctattctaaagtaatgctttccgttcttaaatttgtatgaaccgccataagtcgtgatagtttcacccttatacaatttccaacggttattgtaagaggttctgccagttgaggtacgataaatgtaagtattatgagtaatcttacgtgttacaccatcaatgttggtagcctttatgtattgatccttgccgcttactttatagtaaagcgagccgtcaattttcacagggttgctttcaacagtgacatattgataggcattgtattttacacctgtgctgttaccatccttgtcgtaagctaaagcagtatgcataactgctttagtcgtagcagcttgtacttcattagttgtattagtcaaaacagccaagggtgcaactgtcattaatgtagctgcagaaattaatgcaatcttatttttcttcatcataatcatccttttcaaatctctacactgctattatattctctaaagctaattaaagcattaaaaagaagccaattaagtgaagtggacttctacttttgatattttcttttaatttattttttcaatgccgttgcctcagcttctgctgctgtgtttgaaggggttaatgtcaaacctatattaacaaatttaacatcactagctttaacataggcatcattaccgacttcaatttgatcaacgttacctgtagcatagaacttagtaccaactaaatggtagaataattctgccttgttttcacttggtacccaaatgtatatgagtttatctactttcagatttccaccttgttttacaatttttgcgccattgtggttttgcatagtaccgtcagcattatacacatcagtatccttgacaaatttgatatagccataatgttcgtgatcataatcatgctttactaattttttatcggcagttacatcaatagctaaaagccaattgtctgtaccttttattctatacattccagcttgtgctgcagttgatggaaaatgatcagcaaacggagtaacttctagtttatctacaataaacttcgtaccagctttgagattctttttgattgctttaccttgattatcataaatatttacaccgtaagcattttttacggtaacagttgcttcctcggcattagtattagtagcgttgtttgattcattgctggttaaatttgatgcagtattagtactaataactgggcctaaattatatgatctaatatattgcttacgtggcccacctactctaaagtaacgtttaccgtttttaaatttatatgatccaccatatgtagttacggtttcacctttataaaatttccatttcttactgttggcagtcataccataaggtgtcctttgagtagaagtccggtatatataagcattatgagtaatctttcgggttacaccatcaatattagttactttgatatattcatctttatctgtaactttgtaatattgacttccattgatagttactagttttggatctacatgaacactaccataaacgtaatatttatgaccggtactatttccatctttatcataagctaatgcgttgtgcataatagtcttggttattgaagaatctgcttgtactgtatgagcgctagttgtagtactcaggataggtgccgttcccattaaagctactacagaaattaacatgattttattttttctcattattaaccaccctttgaaaatctctatacttcaattatcttactttgtataaacttagacaacaaaaatagcatcaaatcatattgatttgatgctattaaggctaaaatttacaaatttagtcccaagctaattcataaaccttatttgaaacagttttatttttaccgttaacattagcatggtatgcaacagttaagtaaccgtgattttcatcaataatttggatactttcaacttcactatgttcatctgaaatatctaatccaccaaatgcacttaagtttacattttcccattgagattgatcattacgtgcataaaacggaatttttacaatttccttgtgatagtatgaccatgaaccattacttaaacttggtgatttttgactagtaatataaatattaccagaattatcaagatcataaccttgtacagagtttaaaacagatccatacaaaccatatactgtaaaactagtttcacattgataatttcccatatttacgaaaccattatttccagcctcatctaatgcattattaatgacatttaggtcataaattgaaaagtggcctgttccattattctcaatagtagcaattaaaagcatactataatctggtgaaactgctacttcagcgcgttccatttcatcaccagagcattgatcttcaggattacctgcgcggttcaagtatgctaaacgtgggaattcagtatttgatgaagcatatgatttgtatctaatatctgctcgagcaatttgagaagcccatttattcttgtttttagtaccaacgaaccatttaccagatctacctgaatattcccaagtttgggtgtgtccagctgctgcacctactaaagtaagcacaggggttgtcacgttgccacggaagccacgcaatacatgtgtttctgtctggttatttcttaactgtaaaccataaacatactttgatcctacattacctttttgaactacagctctgtaacctgtattcatatcgaatctatctaaaattctaatatttgttgcatctaacataataaaacctccgaaaaatttaaaaactactacttatcctgagtttgctcattcatctgtttagccacttccgcaaagatgtcctgcacttcttgcctgttcagcttgaagccttttgcttcaaggctgttcactactgcgttgccaacacggttaatcttctgttcgtcagaaagattttctttgtcgtataagcgtacatagcttttcattaagctatctgcagtattgcggaattgctctaagcgtttattcttgaaatgaactctgctcaagatgccaatacctactacgctaattacccataacgccagagtaatcagctcaacgtaatcatgaatatccataattgaatgaatcacctctcttttgatcaaacgatccaagggggctaacgaatgtccattggacttcacctctgtttgataatgttcaacaagacactaatacacttgatttatattagtttttagactaatataaatgtataagaaataaccgaaagctggtaaatgttccgccaagaattttattaacttaggttgttttctttttcatatctcgttgacaatatttactataagttaattaactaattatgtcaataaaaaaagctaaaaaactattattttttcgaacaagtattcttgaaaggcttggtatgattgagttagagcgcacaaaagaattagcaaaaaaatacaaaatgaatctccgtgaagtaaatgacaaggcaggtttaggtagaaattccatctataattggaagaatcaaagaccaggaattgatgcacttaatgcagtcgcagatgtactacatacgtcagccgattatttaagtggtaagacaaacaatcctagcccgtcacctaaaggtgatgaaactggtggtatttctattgatggtgaagtaccatatttctatcatggctacactattccagaagactacctgaacatagttcgtcaacttatggaacgtgatatcaaaaaaggacttattaaacgacatgacaacagcagatcagaataaacaagaactcatagactggttattagcctatgctaaaaaacgtgatattatggttgaattagttgaagtaaatccaacttacccatccatttctttaaagaactatagattcgctgtcattaatactaattggcatcatcaagaagaagtaccattttcaataggtcatgagattggtcacattatgctgactaatggtgaagtagattctcgtcaatatatcacttttacagaacagaattccgaagaaagtccagcagacatcttttcaataaagctaatctataattactcctgcaaaatgggtgattgcttcgaagatacaggtttatttatgcaagcatacgggataccaaatcgagtagctgatgcaactaaagagatatttaagcgagcagcttaaccatcaacttctatattgatttgattactaaaagttttagcattagtttttacactacttaaaatccaattaaacaaaaaatcgctactcaattgagtaacgattttttctatccatccagttcaacgccttgcaagtccttcatcttgctataaaccgcgccacgttgacttgaatcaaactccagaataagcatatctccgccgcgaattacggtttgaccatttggtatgatctcatctccatcgcggtgaattgttcttaccctagtatcaaccggccattgaacctcagaaatggttttatcaaccagtctactgctctcatagaccggcagagccattgtatcagcctgaccagtatagttagccttatggtcactactcttgtccatagcggctgctagaagcccgtagataggcttaccgccaagaagttcatcaactaataacgcaatgaaggccaccacagctaatggcatcaagtgaagtaaggaccctaccatctcagtaattaagataatcgccgtaaatggtgcacgaatgattgctgcaaaatatcctgccattgaaaaaatcactaggttaactactaaacgctgcggtaacaagcctaactgtaccatcatcagtccataagttgcaccaatcaaagcgcccattgtcaaaattggcaggaagataccactaggaagacctgaatcataagcaacaatggagaaaacaattctcatgacataatagaaggctagcatccctacaatgccccaacctgttttagtgattatattcggcaatgccagaattaaccgattacctggaccggtgattaatggccaaaagtaagcaatcgggattaatattgccaaaggaataagtccatgcagccaacgaggtaaaatggtgattttagcatagaccttctttaaactaaataaaccaactttatataaatgacccaataagcctaataaaatccctaagataagcaagtgccagtacaacgaaatcggaaatgaatagttatattgaattgctagggcgtgacgaatgccaaacaagtttgaaacgacaaagtttgaagcaattgcgccagctaaagcattcatccaaactaatggtgaaaagttatggaatacttcttctaagacaaacaaggcaccactcaaaggagcgccaaaagcggcagacaaaccacttgaagcccctgttgcaagcagaattctagtttttaatttgttctgcttgcatccctgagcaacaccttgaccaattgtcgagcccagctgcaatgatggtccttctggtcctaggaatagccctgtgccgataaccaagataccaccgattaatttccgccataaaattggaaaccattgtagtgatagcttcccttgcagttgcaattttacttctggaataccagaaccaccaacatggggatattgtttaacaaaataaccagcaattaccgctaccgcaataaagccaatgataatcgcaataaaccacaacggattctggtgcgctaattgaaacaagtataaccaaaaaccagatgtcttttcgattccaaatctaaataaaccaactactacgccggtacatattccgacaagtagtgcttggagcaacagtttaatattagttctgtttgcctcgtctttcattactttctccctcacaataaaaaaaacgtgtcacaaactattgtacaacaaaaagccagctagaaatgttccaatgtcattaagttaagacattgacaattaagggtgcttttttagagatcgaatcatttggattcgatctctttttttgtataaaataaaggcgaaaagaccagccttttcgcctatcttatatattatatattttaaaccttcaaaattattgccagaaagatggtgttaattatgaaagcccttcataagaatattctagaacgtcttgatcaaattatcaataatactggggatcatattcacgattttattaataatcctcatgcttttaccaggaaacgcactttagatgcagcgacagtccttaaaactacaattaacatgcaaggtcagaatttaaacagtgaactctttagagcttttggcgaagatgcaactaaaaagaacgataaagtagttagtacttctgcctatgttcaacgcaaaagccagctttctcctgcttgttttaaacatattctgactgtttttaatcaaaatctatttaatattcaactttttgatcatcactaccgtttgtttgccattgatggctctgactttaatcaaatctggaatccgaaatcgaataacattgtacaagcttcttctcataaaaagaaaccctattgtcaaattcacgttaatgccttatatgatctattgaataatacctaccaggattgtatttttcagcctaaatcagaaatggatgaacgcaaagcggctgttcaaatgcttaaagctttgaattgtggtccatatattgtaacaatggatcgtggctacactagtttcaatatgattgaaaactgcaatcgcctgcctaactgtcattacataatacgaactaaggctggacaaggcggagttaaagaaataacgacattgcctgatcaagaatgtgatcgtgagatttcctgcctggtaactacttctaactattactacatcacgcataaagccagtgagaatattcaccatgtccagcatcattatcgccaatatattaagtatcgctctaaaaatacccaggatctaagctgggattttggcgagttatgcacaataaaatttcgagcctgcaaatttagaattaatgatgccaaatcaggcaaagaagaatgggaagttgtgctaaccaatcttgatcgaaaaaattatccgctaaaaagaattaaagagctttatcatctgcgttggggtattgagacctccttcaagaaattgaagtattctttaggcagtgtacagttccattccaaacaagataaatttattgaaatggaaatttatgcccatatgattatgtttaatgcaatcagtcaaattgatgcacaggcctatattccgcaaaagcattgcaagtatcaatatgccatcaatttcaagcaatcatgcttgattattcagagcatgtatttggcttcttctttaacgcaagattttgaacggatccttattcagatcagctattataccattccaattagaccaggccgcaaggacaagagaaatattaagcccaaatcagctgtatattatttatatcgcgtagcttaaaaaagcagaatctgtgctatgccttatttgttgtacgaaaaaagcaccaatttaaccaattaaatgttaaatcagtgctttaaaagtctaatattaattgtcaatgtcttaacttaatgacattggaaatgttctaactgacttttttgtttcatgtgaaactaattatttttcttcataccattcggtgtggaagacgccttcacgatcatttctaaggtaagtgtgcgcaccgaagtagtcacgttggccttggatcatattagctggcaagtttggattaaagattgattccaaccagttaagagctgcgctcaaagttggagttggcacaccacacttagtagcaaattcaactgacttacgcaaagctggcaagttttccttcatcaaaccgcggaaataatcgtcttggaataggttcattagcttgccgttcttgtcataggctttttcaatatccttaagcattgcggaacgaatgatacaacctgcttcccaatcttgagcaattgacttgtatcttaagtcccaatcataagcttcagcagccattgtcaattgttggaaaccttgagcataggcaacagcttgggctaattgcaatgatttttcgaatacgtcaaccatatcatcaggaatttcaccattgtattcaaacttagttggtttaacgcccttttcaattgtcaagtgtgcttgcttactcatgaaacgtgccattacagcctcggctaccaccgttacaggagcgccaagtgcaacaccatcttcgagcatccagttaccagtacctttgtatgaagcaacgttcaaaatgtgatcgattacgtgatctggcgttaaatcatctttttgtgccaaaacctttgaagtgatttcgctaagatatgcttctaccttaccatgattccatttatcaaaaatttctgacatttcatcatcgctcttgtgagcaacgtcacggagtaagttgtaaacttctgaaaattcctgcataataccgtattcgataccattgtgcaccattttgacatagtgaccagcaccttcaggtcccatgtagtagacacatggcttgccttcagtattcttagcggcaatagcttcaagaattggagcaacttccttataggctggttcatcaccacctggcatcaaagctggaccattcaaggcaccctcttcaccaccggaaacacccataccaataaaatgaatgccgtgcttttccatttcgtggaaacgacggttagtatcgtgataatttgagttaccaccatcgattaaaatatcgcctttatccaaaagcggcagcaatttttgcaaagtttggtccactggatcgcctgccataatttgaatcaaaatcttgcgtggcttttcaagtgagtttacgaactcttcccaggtgtagcaaggctttaatttatcatcttcatattttgcgaaagcatcaacttctggtttgtcgattgagaaaccggaaacggagaagccgtggtttctaacattcaaagcaaggttcttgcccataacagacaaaccgataacgccgaattgttgcatgtttattaattcctccattaatcaaagttcatcaagtattattatacgttctagcacgcaaaaaagcgaaaccaaaaggttccgctttttaaaatctagttaataatttttttgttattgggtaaaggtgtttcacacactgctcggtaatatttcctaggaaatattacttttattgatcaataccccaaagtaaaatgttaaatgctaatggtaatgttagcttggtaatgtatccatcctttttagcctgttttaaagatgctagaacaaatttacgttgttgacccgttagctttttggctactttaacagctaaattaaagtcatactcgttttttctaatagcatttttgataactatctttgcccacagaaataggttgagaatcggagtttacagttacaatgtagctccacttgctaagtcgaggaatatttttaattgttatagctttatcaaacttagctactgcagttgaattgctgttgtctgcagcgttggcagtgacagacgatgctgaaaataatgctgcaagtaaagcagtagcaagtaaactaattagagcttttttagatttcataatttagcatctttttacacatagtgcttattggctaataagcattaattcatatccaacactgtctattataagcatctgtattctatttactagccaacaaactattttatatttaaaatcgtatataaaatgaggctatttcccaggaaatattttcccatacaaaaaaagcgggacaaacgtctcgcttctttataattactcaaccaaattagtgttgtgaagcacctgaaaccgtatcaggagcaggatcctcttctggttctgattcttcatgttgagatgcacctgttgcagcgtcagcttctaagccgtacttttctgcaaagtaactgaatggcttcaagtcttcagcttgatacttcttgacaaaggctgggtcgtcaagtgagttcaactcagttgagtaaggcatttcgtgagtgtacttgacgtcgatcaacattggaccgtccatcttcttgaattcgtcgacagcatcttcgaattccttcttggtgcgaaccgttacacccttaacattcataccttcagcaacctttgcccagtcgttatcagggataataacaccagataatggttggtgagattcatcttcttgttctgcttgaatgtaacctagtgtttcgttagtaaatacaatattcaaaacatgcatgttgtaacgagccatagtaagaagttcttggttcatcatagcaaaaccaccgtcaccagctaattgccatacttcacggtctgggtaaacagttgctgcagtaagagcagctggagcaccataacccatagttgcgtgcaagcctgaagtagtccacttttgatcatcatgcaagttcaaaagacggcatgagtcaacgttaacgttaccaacatcaatagcaaagatggcgttgtcatcagccttcttgttgataacatcccagattggttcaggacgtacaggcatttcatctgagttcttaaagcttgcttgccatgcatcccagttctcacggtctgcaatagcagccttgtaaagtggtgattcgctacgttcttcaccagcgtcaataattgctctcaaagccttcttagcatctgcaagcattgaaacatcagttgagtgacgcttaccaaacttagctgaatcaacatcaatttggataaccttagcgttcttagggaaccataaaactgagaatggtgagttgttacctacccaaacaactaagtcagttgcgctttggacttcttgagcagccttaggtccgatacggccgatagtacccatgtatgctgggaatttgtcttctactacacccttgcctaagtatgatgacataataggggtcttgaacttttcagcaaattccttaacttcttcaccagcatcctttgcacctaaaccaatgtacatggttgggttcttagcttctttcaaaagcttaacagcttcttcaactgaagccttagttggtgctggataattgtctgctggatgagcatccttgtttacacggaaggtgtcatcaatcttttgccaaccgtagtccttaggaataatgataactgcaggaccctttcttgcgtaggcttgacggatagcttcatcagttaaaattggaatttgttcagcggtcttagcttggcggcaccaaacactagcgttcaagaaccacttgtcttcatcaaaagcttggaagaagtcaatatcttgacggctagttggaacgttagcaacaattgctaccattggagtcttgtcaaacttagcatcatacaaaccattgaataagtgggcagcaccaggaccagctgaaccgaaacatacacccaacttaccagttaacttatattctgcagaagcagctaaagcaccagcttcttcgtgacgtacttcaataaatttcatcttatctctaaagtcatagatagcgttcatacttgagtcgaatgaaccacctgggaaaccgtagatatgatcaattccccaatcgtaaataactttaagcattgcatcagaaccattaatttttgtcatataagtgcatctccttaacttttgttctttcataatgtattaaaacactttttttcacatttgcaaaccgataaaatcaccgttattacgcaaatgaaaacgcttttgtaataataatcacttcacaagctttaccaaattcaatatctcaaaaagctgaatggtagcgttttatattgtgatttgatgaacattattatactaaatttcacttattttatgtatattcattgttacttatagtaaaaatttaagaaaaaattttttacaatttatttcatagctatccaatttagaaaaacgttattttataattttgcgcataaaaataacgtagaatactattcctacgctatttttgtgctattctactttttcactctagagtaacgcccattttgaatgtaaacactcaagattgccaagtcagctgggttaactcctgaaattcgttctgcttgagctaaagtttcaggacgaattttttcaaatttttgccgtgcctcagtagctaaaccttcgatttggtcataatcaatatctgctgggatttttttggcttcttgtctctttaagcgagcaattctggtttcttctttcttgatatagccagcatacttgataccaatctcaacttgttctttaacgtaacgatcgcctggaactttttcaccagttaaccgttcaatatcagcaatagtaacattagggcgacgcaagaaaacatcggccttaacaccggccttcattggttcctgaccaatactttgcaaaaattcctgcacctcatcagttaaatgaaccgtaatttcatgcagtctcgtctttgcatcttcaatcgcatgcttcttttcttcaaatcgtgcgaagcgttcgtcagaaattaagcccagatcatgaccatattcagtcaaacgcaagtctgcgttatcattgcgtaaaatcaaacgatattctgctctactagtaagtagacgatatggttcattcgtccctttggttaccaagtcatcgattaacacgccaatgtaagcatcgttacggcctaaggtaaatcctggcttatcttgagcagataatgccgcattaattcctgcaattaaaccttgaccagctgcttcttcataacctgatgttccattcatctggcctgcagtaaataaatgctttacgtttttggtttccaaagtatgcttcaattgccatggttcaaccacatcgtattcaattgcatatcctggtcgcatcatttccgcatgttctaatcccgcaacagaatgaatcatctttaattgaatttcttctggcattgaagttgaaaagtcgcctacataaacttccttggtagtctttccttctggttcaaggaaaatttggtggcgatccttatctgcaaagcggacaactttgtcttcaattgaaggacaataacgtgggcctacacccttgataattccagagaacatcggtgcacggtcaagattgtttctaataatcgtgtgtgtggttggattagtataagtcatccaacaagaaatttgtttttgtaaataatcttcatcacgactttcatatgaaaagtgccgtgggattttatcaccaggttcttcctcagttttagaatagtcaattgtattgccgttaacacgtggaggagtaccggttttaaaacgacgcagcttaaaacctaacttttctagattttccgacagcttaattgaaggagtagtgttatttggacctgaagaataagtcaattccccaataataattttaccgcgagccgctgtacctgtagtcaaaacaacgcttttagcatgatacttcgcaccagtattggtaatcacacctttgcagacgccatcttcaactaccaattcatccacgatagcctgacgcaaggtcaagttgggcgtattttcgatcgtatccttcatgtgttcatgatattgccacttatcagcttgagcacgtagcgcacgcacagctggccccttacccgtatttaacatccgcatttggatataggtagcatcaatgttctttcccatttgaccacctaaagcatcaatctcacggacaactgtccctttagctggtccaccaacagatggattacatggcataaaggccaccatatccaaaccaatcgtaaccagcaaagttttttgtcccatgtgggcacttgccaacgcagcttcacatccagcatgcccagcaccgacaacgattacatcatattcatttgaatcatatgttttaaccattttcatcctactttcctaaacagaattgactaaataattgcgtgattaattcatctggggcactttcaccagtgatttcacctaaagtatcccaagcaccagtaaaatcaatttgtgcaatatcaacagggacgccatcttcaactgcttgaattacatcttccaattctttcttagccttatgcaataaggaagcttggcgttgattggttaccataatttgatcattagaattttcaatcccagcaaaaaatagcttattaatcaattcttcaagcgcatctaagttttgttctttcaaaatcgaagttgaaataacatcactacccgttagtttctccatctcagtagttgttattttttgacctaaatccgacttatttaagatcacgattcgcttcttgtcctttgttgcttcaattaaggcttgatcttcagctgttaatgcttgactagcatcgattaacaacaagaccagatctgctcgctccaaggccttttttgatctttctacaccaattttttccaccttatcttcagtgtggtggattccagcagtatcaattagctctagcggtactccttttacagacacatattcttctaacgtatcacgcgttgttccagccacatcggtcacaatcgctttgtcgctttgagtcagataattcaataaagaagactttcccacattaggacgaccaacaattgcagtagccaaaccattgcgcaagatttttccttcttgtgctgtcttcaataagcgattaattttatcaattactgatctagatgtgtctgccatctgttttgcggtaacagtatctgcatcatactctggataatcgatattaacctcaacgttagccaaagtattcagaatttcctgccgcattgcctgaatcttgtgtaacaatccaccagctaattgaccaacagccacttgtcgtgccttatccgtcttggcccgaacgatatccatcacactctcagcttgagttaagtcaattcgtccgttcacaaaagcacgtttagtaaattcaccaggatcagccattcgcgcaccgtgactcagcaacaattgtaaaatatgattagttaccacgattccgccatggcaattgatttctacaatatcttcacgtgtaaaggtcttgggcgcacgcagcactgtcaccattgcttcatcaatcgttttcccagtatccggatcgataatatgaccatagtgaatagtatgtgtcggcaccttgcttagatcttcgcctttaaaaacctcatcagcaatcttaattgcatcctcaccagacattcttacgattgaaattccgccttcaccgatgggggttgaaattgctgcaatagtatcgaactctgtcaaagtttgagccataattcttcccttttctcaataaaaaaagcgcattataccaccacgaataaccatgatggataaagcactttgactactttatctaaaaatcattttagactaatattcttttatttctttttgcgtcctaaacgcttgtaagcccttcttagtttacgtttgcgttcacgctcagcctcagcctttgcttcttgctctcttctatatttaatagggttttgcaagataaaggtttgaagcgcctggaacaagttggaaattacccagtaaagtgtaatagctgactggaagtttaaggccatcacaccaaccatgatagacattccgtacatcattactttggtcattccattttgcgatgattttggcgtcgataattgactaatatacgtcgataagaacgtaaagatcattgctaaaataggcatgatgtaatatggatcgggcttgcttaaatccatccataagaagcgcccagtttgtaactgcggtgtacgtaaaatcgcaccatacagtgcatacataactggcaactggatcaggacaggcaaacatccagtataaggatttacgcctgcttctttataaagcttgttagtttcttgttgtaataatgttcttgattcagtgtcacgtcctggatatttcttacgcaactcattaatttgtggttgaatgctttgcatcttagtagtacttcgaattgaaatagcattcaaaggtactaagatgacacgaacaatgacggtgaagacaataattgcccagccataactgttccccattaacttagctagccccaaaataaaagctgacatgtaataaacgatccaacggtcccaccaattaccacttgtatgtgagattggcgttgcttgaccatttgctcccgtagtagcacatcctgtcaatacaacagcaagtattgctactgctaagactgcaagaagacgtttgacatttctcttggtcagaatgtccttcaatctatttttcctcaactttatctggcatttcttcaataatatgagctaacgataatgcgtgaagcaagtttttacgcacctgagccatattaaaatcgcgagcataaggtcgcgtaatgattaaaaaatcaacatgcggattaatctgcaatttttcttcatcaatcacggcccgaatataacgcttgagtcgattacgtgcgactgcggtatgaccaacctttttgcccacagaaattcctactcgaaagtgtttattttctgttttttctaccttataaatgacaaaagctcggttagcgactgagtcgccagattcgaaaacttgctggaaatctttttcagattttactcgataagactttctcaaaacgtttcattccactctagtagactaaaaaaaccactgggattcagtggtttaagcagataagacttttctaccttttgcacggcgtcttgctaaaaccttacggccatttgatgtgctcatacgcttcataaaaccgtgaacacgtgaacggtgacgcttcttaggttggtaagttctcttagttgtcatattaaactgcacctccataaatttttgtgccaattgcacaatgtcttattaaggatagcacgaaaagccataaaaaccaagtattttaagaaaaaaagacttttaaatcccgtgaatattttctaaaaattcattgtttttcatgtggataaaaaataaaatatttttcttacgtataatttccacaagataattcccaacgttttccacaactcacatggtgttaaaaacttaattcacaccatgtggataacgcatatggtattttacctcaagtattgatagaatagtatccataattcacagctgtactgtgcataaattaacggttttgctcttatcatgtcaaaatgtgcatatcgctttaatagttgtcaacaggctgtgtactttgttgatttctttttcacctgtggaaaaccagttaagtaaatggtaaaataaatttgctttttactaactgggggaatgtaca

SEQ ID NO: 6 - DNA, 16661 bp, Lactobacillus crispatus
  source 1..16661: mol_type = other DNA
atgaatactccagctggtcaatggctacttagagaaattattgcaaaaattcaaaataagcattattcacgttgtgatgtagcttttgatatttataatgattctgagattcagtattatcaggtatggcgctggggaatgactaaaaagtttttctatggtaagaatggggaattgcaaacggtatatttcggcgcgcgttcaagtgagagacaaattcgtttgtataataaaaaaattgaacaagaacaaaggcatggacgaattgtaaatgttgattcactttggcgattagaaatgcagttgcgtggttcaaaaattgaaaattatgttcaggaagttagagaaatgctggaaaacttttatttgccagattgggaccatgaggaaaatttaaataggcaaatgatgatttatgcgttggttcataatcctgaattctatagtaaagcttctcgggcttctaagcagagatatagaaaaatgatttatgaagctaaaaagtcaaatagggtttctaaaattttagcgaaagaatttgtaaatcagtttgatattcttgaaggaactttgcaaaaaatgatgcagaggtatcatgctagaaatgttgaagttaaagagatagagcgtgataaggaacctgtagaatattctcaagagttaatttttcgagttaaaaaatatcgggaaattggcaaaagcacaagagaaattgcgtcgactttaggaattttggttgaaaatgttgaagaaattttagagttaaaaaatagaaattttgataactagactcaaaaatagagcaaaaaatgttacgtcttggacgtaatgagctacgtaagaatacgtcctgttcggatattacaaaaaaacattacgtatcaagacgtaatgtcaggtaaaagacgaacaatttagaagtatatagacgtcaaattaatcagaagtgatatcacttctaaaaatgcgaaatcgcttggtacaaccaagcccagcacaccttgataaaaggcgtggggtcagatttcccttatgctctttactagagataactaaaagaagcagattttagtcaaatttcagagtagaaactagaaggaaaactagaaactagaaatcagaggaaagaaaaattatggtaaaagttttaatccgtggaatcagcgaacaaaacttggctagaattgatcggattgttaatcaattaaatcaaaattcaagtaagaaaatttccagaaatcaatttttgagagaacaaattgaacaaattccaattaattttcaaaatcaaaatgaagattcgcaaactagtttattgattcagaagcagaataaacttctgcaggaaaatttattagggctgaatgttcttgcaaagtatttcattagtggagatgttaatgacaccgaacgagcattaaatttgttagatagtttgtcagaagacacggcaaaagaagatgattaaatttagaaagagggcaagaaatgggacgacagcactttttgcaatttcgactcaacgataagcaatgggaagaaattaggcagattagaaaagaacattgctttgataataatggtcaactttataagttcttattcttcaatgccatgttaggtgttcaaaaagaaaaagaactggaagagttacaaaaaattaatcaaaagattgataatgctttgaaaaaaagacaagaaacttacgctgattaagaggaccagaaaaaatgattaagacaacttttagagcgacaatttctgatacagatttagattggattcaagattataaagaggaacacgatttaaaaaataatgctgaagtaattcatcatcttatgaagttagcagaagaaaatgaaaaaaattctaagtggacaaaagatttaagtgatattagaaaacaacagcgatttaccaaagaacaagttgcaattctaacagaaatggtaagtcccggatttaaaattgaagtgcaacgctaagtgttaaacaaaaaggccatgaagacctaaacttgaagtgacgaaaaatcaaggaaggtgaatcttcatgaccaattcaaattctagcatctctagacattatcatcaattaaatagtgtacaacgaggacaaatacaagctctgcttgatttaggcataacctcctgttccgctattgctcgagaagttggctgtcacaaatcgacaattagccgtgaaatcagacgtggcagcgtcctgcaaagagatcataactatctgctctatgagcattactatgccgatactgcgcagatctatcatgataagcgacgcaagaactgctataagcgtgatcagttaaagcattatgctgtttttctgaaaatgctgtctaagcggtttaaaactaaatttgatgctaccagcattgatgagtttgtgggtgagttcaagcagacgatgccaggctatccttgccccagcacgcctaccgtttatcgctatattgatcgcggtttgctagatataagcaatattgatctgccaatgaagcttaaaagacgcagaaacaaacggcatcatagtcatggtgggcatgctttgcataaaaagaatcttggcaattcaattgagcagcgtcctaaagaagttgaagacagagcaactcctcttcactgggaaggagattgggttaaaggcgttagacgtaaaaatcagcctgctttgatgactctgacagaaagaactactcgttttgaaattgtcatcaaaataccagattatcgagcaagtacttgtcaaagactgcttcaaaaagaaatagaccagcatccagattggttcaagactattacttttgataatggttctgagtttgcagatatgactaaaattaaaaactgtcagatctacttcgctcatccatattcaccttgggaaagaggcacaaatgaaaactgcaacggtcttctgcgtcttcttccctaaaggcaaaagcatgaacgataagacagctgcatatgttcaacaggcaactaatgccattaaccacaaacatcgccgaatcctccaatatcacacagcagaagaactcttcaagcaatatatctcttcataacctaactgttgcacttaaattgacaattcaggaactaatttaagttctaatttatccgtttttttagttgcttgtacatctggttcaattcattagcagctatgaaaaacatatgcaaacaactacattgtatttatttgtagtcattatggcttaacatgcctatgcttttcttatcaacgtcttcatcagttttccgatattccaacttgggagtaatcgcattgaccgactcttttgacttctttttcggacgtagcttcgcccgcattctttttataaggctttatttaattctggatgttttaccagaattattaagttgagcatggcgttttcgtcacggtcaacttttttattatagttacggcagttcggattataacaaacaaattcattatgcttggtgccatgcttcttattgcctcttaaagtgattttttcatcgccttttttcactaatccgcaggctgcgcacctttgagttgaagggtacagtttattggctacgatcaatttcttgccataccattcgcatttataagtcaatatctgtctaaatctgccaaacattgacctgtgcattcctttggaggcaacatgactcataagcattcctttaacgcttaggtcttcaatcacaatagaatcatattcgctaaccagctttgtggtaaatttctgcatcaaatcattttgaatatttttagcacgagcgtaagctgcttgaagcttgtttctcgctttcatgtagcgcttgctttgcattcctttgattttaccattgacgacacgctttttagacagctgtctttgataatgcttgattttgcaatagactgctgctaacgatttgggcattactatgcattgaccgtctctgtaattgaaatgtccaacattgatatccacgcctgtatatctgcctgtcttaggcttgtcttctggatcagatattttaaaaggaatggatgcatagtatctgtttttttctttgtaaaagctgattgttccgaaatcatccgacaatggagcagagcttaatttaaagccgttccatgtttctttgacagccctaggcttttctaaaaataagcagccatccttaattttggcctgatccattttaaatccctgcctaggtgcttttttagacttgaattttggctttccccagcctggctgcgctttatcaaaaaaattctgccaagcattgcctaagtcttggatcgccaaattaaagacatgagctggaagctttgtctgccagtattgcttgttttcagtcagctcatcacgaattctgcgccaggaagggacaggattgtttgcgagaatttctctttcagcgtttgtaagcttttgtttttttctaggctttttaagttctgctttaagatgctgggttaaagccaattgtctggcttcatgcatattttgccaggtttctaaaccgagattccagctgaagcgtctgtaatcacaaagcgaatcaagaaccttcttcatcctttgattgggttttaatcgatatgttctggttttgatgatcactcttttcaccttccttctttaaatcccgcctaatcttcctgccgtaccgtctcaacccataaagccgacatgaaaacacatgaattactgaaattaagtcttcaaccatttcctcatctggagaggtttcagggttgtttaaaacaataattttagtatcgtgcttagcacaaaaatgttcaaaccaatcaaagccaaagcgggcaaaacgatctttataggtaacaaagattcgttctatttttcctgcttctacttcatccaataatttattccattttttgcggttataattaagccctgatccaatatcttctacatgttcatcaataatgatgcctctagcattggcatattcaatgatgaaagccatctgatgcctaagattttctttctgacctacagaagaaacacgggcataagcaactgtcttgcggtgaggcttaatgcccctaaaagcatccagccgctcttgcgtatagtatctgcgattggcaacattgcgctgagcaactagtcttttttctcgatcccatctttgcatggtagagcgagatacaccgagaagcttagcagcttcgccaactttataaattcttgacataaaaatagacctgctttctttgcggtcaattatatcattaataggcatatttagatatattaaatacataatttactacttgtgattaacacttaattttttgtttgctcgaatttgtaatccttggataccattatcatatgtccactttttaacttcagtcatgtcattagtccgataataattggcaattagttcgttccattgatcccacttatctaatgggatattaattaaaccagcgccaccgtcaatcataattttattggcacttaaagttgccgtccttttgtttccgtcccaaaagatttgttgacgcatattatgatacatgacagtcaatgctttatcagtaatcgtcgttcgtggatcagtcaagattttttgtaaaaaggattgttcctgtttttcgttaattaaaggcggctcaaaaaagtcttcactacctaaattaactccccctttcccttgccgtaattctcctggtactaaggcgtcttctgctgccacaattttgttgatttgtttttccatggttaacgttaaaggggaattttgagtagtgatatattgccacccacgctttaaattaacaatcgtcaaaacatcttcaacaggtactcctgctacgctcataccgtccataatagtttgtgtttgtggcaatgtggtattaacgccttcaaagcgagcattagtatgcactaacttggtaaaatttgctcgggcaaaccgttggttttccgcagttgtgaatctatacttgtccatatatgttcgtgtcttagccatattttgtgcctcctttttatttcaatcattgattatttgaactgtctatgttaaatcaaaaagtgcttttcattgatgatttgttcttggcgtttatctaagaggtaagtgtataacgcgtcaaacagcttgcatttatcaggatctcgattttgggctgcttgctcccaaatgtcttgaatatcgactgcccatgggtcagccaacaattgctcattttttttcaacttctttgcttggtttggtcatttaaaaagcgcctatcccatttttctagtttagctatcgccaattcgcccactcaaggtatctgtttttacttctaagcgattttaaagtggctttagtaaaatatatgcgtaacacttgaagtggcttaaatgggcttatatggcgttttagtcccaagcgcgctcgccatcaagattctgttcttcggggtgtttggccgcatattctctagctgcttgtcggttccaccaaacaccaaataggttttgcatggtgccgtacaggtagttctcaacattcttgatatgcttctcgtcgcttcttagagcattaaaatagcgtcttaatgttttggtcatcattttttttaaatcaggatcgtctaatagaatccatacgcctaaatccttatgctctttttcaacagcatatttggcgtttaagataatgccaataaagcgccgcatttgttgtggggtacggcaccaaaagctaagtagttgaactgcttctggttctaagaagaccggcaacccattatcttcgtcagttaagaactcatcagcatgttttactagatctcgattttgggcttcaatttcagctggtgaaaaattagttgtggaaaagtccaacttttgagtatctatatcgtatctattagtatctatattatttttatagtctttatatagattgctttcgattttcgaaattccgctcgtagcaagggtttgagggttgtcgtcaacgaagtcatgcggactttcgattttcgaaattccgctcgtagcaagggattcaacgaagtcatgcggactttcgattttcgaaattccgctcgtagtaagggattccggctttttttgcccatattcgccccttaaatagacatcagtagctttcacatcgagtttagaaaggtatagacgatttggttcattctttttagttttaggattaaatcccatttgaatttgttttaatagattggctgtttgcaattcttttttgattttaacggctttttcagtagcgcagttaaataaatcttgtaattctttaacggtaaaaataaagtagacgtgcccttgctcatcaacccagttgttgcgtaaagaatactcgagccggtctttcagtaccatataagccaatttagcatcactgcttaaatgtttatattgctcgccatacattaataccttaggaaactggaaaaataaggctccatatacgttatcggcttcatagtaattgaaatttgttgattttgtcataataaaaactccctttcttgactgacacacgctgtctcaaaagagagttgctaaaacatctgacttgctttaaaatacaaatctgatatgctttaatagaattacaaagcggatattggtcgtgatcggctttgtagtttcaccagcatgtgtctattctgggttgcccagtcggcaacttttttaatttttaagaactaaaaatggactaagtagttattagaagctacttagtccattggtcttgtcttcgttttaattagtttacctttgcttgccctttaaggtttgcttgcggtataattagcacgtaaacaagattacaatttgttcaagcaattttaactcggcggtgaaaattgcttggactaggtagctgcaagatagctacttgtcaatactgcaaaaatcccaatcccgagtgtattgggattttttgtttatgaacaaagcatatcattctgcaaaggttaagtaaatattttcatggatatgatttatgattaatcataaatcatataaaatttgcgattaatcataaatcatggtaaaatgtttatgtaaaggtaggtgctactatgaatgggaaaacactattaaacttcaactttaaaggtggcgttggtaagaccaccttgactgtaatggaaacctatttattgggtcaagaggggaaaaaagtactactgatagatttcgatccccagggaaatgcaactgaaattatgaaggagacttataaagccgatttaaagccggaactttcattatatgagggccttcttggagggaatttgtctaaatctattgtgtctgttacaaaccaaattgatatgattcctacagattggacattgtctttatggattggtgctgtagaaaaagttagtcgggttaaacgtaatattctattaccacaaatgctttcaaaattaaaacaaaattacgattatatttttattgacgtaccaccaacaataaatgtctttactaataacgcaatcatggcttcagatttcatctcaattgtcttacaaactcaaaagcagtcatatacaagttctttaaaaacagctacgcatttaggtgaactacgtgaacaatacaatggaagttttcagttagttggtgtcatattgtacttaatgaagccacgtgcaaaagttgatactgaaatttctgcacaagcaaaagacttttttggcgaaggggtcttttcaaactcaattagaactcaagaacgggttaaaacgtttgctaatgaaggaatacggaataaagaccattgggataaaagagcaatccaaatgtaccaaatggttcttaatgaacaactacttagaattcaacagttagaggagtaatttatcatggcagaagattttttaaacaaagttagtaaaaaggcatctgaacaacttaaaaatctaaaaagtccataccaattcgaaacagaaagaactaaaaccgttcaacttcgcatgagcacatataaagaagttaaacgcatcgcttttgagaatgacaaaaaaattgttgatgtcttagaaaaaattattcgtgaaggccttgccaaacgtaaataagattgagcttaacttatgtattactgattgtgtgatttatgataaaagattaatcttttatcataaatcacacaatcaataaacttcactgtacaaggtatatttaaaataaatttgatttaaacatacgtggtagatcgcaaatttaggggtctagaatttttggtgttggaaagtatttccattccaaaagtactaggccctttttgataacaaaaaaaggcatctaagcctccctagtgctatgctttaagcgacgaaactcaagataagcgggggtaggaatagatgtctcaactagataatacacttaaattactgggagttacagacacaaacattcgggtgttcggtactcgtgaggaatttcatggtcggggctcgggtcgcaaaaagtatttggtcatccaggcagagcttacctacacactcaggcgctgtcccagctgtggatacaatatgttgcaccctaacggacacaagctcactcatgtccacattgcaggatccatggaccggcccgtaattctagagctaaacaagcaacgctggcgttgtagtaactgccatagcacttgtacggccaccactccagtggtatcaaccaaccacgccatcggtcacggactagcgactcatgtgctgaagctagccagtaaatcactcccggctaagactatcgccagtctcaccggtatttcgacaaactcagttcagcgtattttgacgttattagctaatgcgttattttccaaagccaaccatgcctttcattatttgtttctttagttaatagagttactgcgaaacatctgctataatcttaaattatgaaatacgaaacagctaaaaatttaaacaataccagattcaagcgtctgatcggcgttgccaagcctgtctttgacgaaatggtcaaagtattaaaagccgaatatcaagtcaagcatgcccgaggcggcagaaagctcaagctggcaattgaagacctgcttctggctactttgcagtacctcaaggaataccgtacttatgaacaaatagctgccgattacggtgtgcatgacagcaacctgatcagaagaagccactgggccgaagagactttggctaagcatggctttaacattggcaagcaagaaatcaagccagacgatgttgtcttaatcgatgccactgaagtaaagattcaacgcccaaaaaaagacaagcagcttattattccggcaagaaaaaacagcacgttttaaaagcccaggcggaatttcctcatgtggattaccgaaatcatcaaacctgcaatttgaataatctaatacctcaaaaccagctcccgaagatctaataaaagaaaaagtcagccatttacgaactaattttttaaaaagctctgtcgaaaaatctccaacaattgttaatcgatctatgctaatttttacattttgtctcagatttgagtactctgactggctgttagaaagagccagcccttttttctcatttttattctctactcctacttttacattttcattctctacttttgatcttctatttctaacattaaatggtaattattgaaaataataatacttaagcagtttctttttagaaactgctttttgttttgtaatcaaaagttgaaagtcttgaatacaaaagtagaatcttctaagatagggcataagccatattcataacttgtattcataattgaaaggaaatatatgacaaataccatttatggctatgctcgtgtttcaactactcagcaggactatgcaactcaagttgaagacctaaaacaggcaggagcgaccaaaatctttaaggataaatacacaggcaccacagcaaatcgaccagaattcgataaattgatggctcaaattggtagtggtgataccctaattgtcaccaaattagatcgactagcacgtaatactcaggacgcattgaacattgttaaacaattaaatgctgagggaatcattctacgcgtcttaaatattggtacgattgataattcaccaagtggccgtctaatcttcactgtattcagtgcatttgcagaatttgaacgtgatcttatcgtgaaccgaacccaggaaggcaaggcatgggcaaaagccaataatcctaacttccatgatggtatgcctcgaaagtacacctcagaacaaattgattttgcgtggaagctccatactcaagaccacatgagctattctgaaatcagtcggaaattaggtatgtcaaaagcaactatctaccggcgttttagagagttaagagacaaaaaagccgccccgaaggacgactttttgcactagtgctttaatagctggtttagttcgtgaaggactaaatgtaattcattcaaaagtgcgattgttaggattagtgttacaacatctgacatgatacagctcctttctagccttttacagcagtgtaggggcacaaaagcatgccataactattttatcatgttataatgattaaaggattagtgttatgctgtcgacatgaacgaggcatgcaaaacgtgggcggtcgtttgaccgctttttttatttagcatatttctaaaatttgaccaaaaaaataaaaaagcgttgatctgtcgcactttttcatcttgggaaaacaaggcatgagcgaaagctaataataccaacctccatgatggtatgcttcgaaagtacactccagaacaaattgattttgcctggaggttgcatacaggagctattctgaaatcagcaagaaattagggatctccaaaacaccaatttatcgacgctttagagaattaaagaatgcaaaataaaaaagtcaccgactatacaactgccgatgactctggtcgcgtctactaatgatgactacttatcaagtagattatttagttcccgaagaactaaatggagctcatgtagcagaacgcaaattaggaaaattgtcatgtcgtccaacgtctctcacctcctatagggtggttgattgagccaaccctagaatgtgcatgaatgacatgcatttttattttagcatgttataatacatgtaggaaaattgtcgcgtccaatgatcatggatgcatgcgcagcaagacgataacttgcgaacgcgcggtggctctgcataatagcagggcttttttgttttgaaaatcattattcaaagctaatttctgacttaatgctattttgtctactcctttttttaattatttattggtcatctccatcacgatcatcggaatattcaaaatttgtttccgcattatcaccttgctgatcctgatcctgatcgttatcggtattaattctatttgaaatttcagcgctatcagcagaagaactcttcaagcagtatatctcttcatagcctaactgttgcacttaatttgacaattcagggagatttttttgtcaaaaaagcaaaaaacaacacctacattatttttggaagataaaataaatttgaaaataattttgtattatcaaaacggcttagccacaatatattgattataaatagccaaaaatccacatgttgtattattgagcagaagatgctatattatgttcacacaaatattagataaaacaataaataatgataggagcaaatacaaatatgagttattatgatcattcacagtcaccagttgaatttgcttacaataacaacggcaaaaatatgcgagctattaactggaatgacattaaagatgataaggatcttgaggtttggaacagagttactcaaaacttttggttacctgaaaaaatcccagtttcgaatgatataagttcttggaatcaattatctgatgactggcaacagcttataactcgcactttcactggattgactttattagatacaactcaatcaagtgtgggtgatgtagcccaaattaaaaattcacaaactgatatagagcaagctatctatgcaaattttgcttttatggttgctgtccatgcaagatcatatggaactattttttctactttatgtactagtgaacaaattgaagaagcgcatgaatgggtagttaataatgatgctttacaagcaagagctaaagcggtaattccgtattatacaggcaatgatccgcttaaatcaaaggttgccgcagcaattatgccagggttcctgctttatggtggtttttatttaccattttatttagctgcaagaggtaaattgcctaatactgctgatattattagattgatcttaagagataaggttattcacaattattatagtggttacaaatatcaattggccgtaaagaaattagctccagctaaacaagcagaaatgaaaaaattcgtttttgatttcttagataaactaattgatttggaaaagaaatatttgcacgagctttatgatgattttgatttggttgatgatgcaattcatttcagtttgtataatgcaggtaaatttttacaaaatttaggctatgatactccttttaccgcagaagaaacttatatttccccagaagtattcgctcaattatcagctcaagctgatgaaaaccatgatttcttttctggtaatggttcttcatatgtaatgggaacaggagaggagactaaagatgatgactgggatttctaaaaagccattagttgtctattattcttccacttcaaataatacagcacgctttgtagaaaagttagattgtaattctattaggattcctattaaactcagtaaagaaatttcagtttctgaagaatatattttaattacgccaacttattctggtggccatgggactacaggtgctgtgcctgagcaagttatccactttttgaacaaattggctaatcggcaaaaatgtattggtgttattgctagtggaaataccaattttggtaattcttttgccttggcaggggatgtaatttctaagaaattacatgttccttatctatataaatttgagttactgggaacaactgaagatgtaaataatgttaataaaataattgctgatgcaggtgaggacaatgactgatcatcttaataatgattcatatatttctttaaatgcacttgctaaatttaaagatgaaaaaggaaattataattttaaagctgacaaggaagctactaagcaatatcttgaaaatcatattgaaccaagaatgaaaaagtttgcttctttagaagaaaaattagcttatttagttgataataattactatgataaaaaagttctagatttatatacagctaaatttattaaagaaattttcaaattagcttatgcgcaaaattttagctttttgaactttatgggtgcagctaaattctataaagcatatgccttaaaaacaaacgataataaacaatttttagaacgttttgaagatcgggctgttatgaatgctttatttttagctgatggcaatgaagaactggccttgaatttagttaaagatattattagtaatcgtttccagccagcaactccgactttcttgaatgcaggtaaaaagagacgcggtgaatatgtttcatgttatttgctcagagttgaagacaatatggaatcaatttcacgagcaataagcacaagtctgcaattatctaaacgtggtggtggtgttgctctatgcttaactaatttgcgtgaattaggtgcacctattaaaaaaatgaagaatttatctagtgggataattcctgtaatgaaattactagaagattcattttcttatgccaatcaattagggcaaagacaaggtgccggtgcagtttatttaagtgcccatcatccccagattctgcaatttttagatactaaacgagaaaacgctgacgaaaaggtaagaattaaatctttatcacttggcgtagtgattccagatattacttttgaactagccaaagaaaataaaaagatggctttgttttcaccatatgatattaaacgtgaatatggtaaaccaatgtcagatatttcaattactaaagaataccaaaatctccttaataatccatgtattaaaaagacatttatcagtgctagaaaattcttccaaactattgctgaagttcaatttgaatcagggtatccctatattatgtatgaagatactgtcaatcgaagaaacccacaaaagaaattggggcggatcgtgatgtctaatttatgttcagaaattgctcaggttaatacgccaagtacctataatgaagacttaagttttaataagacgggctacgatgtttgttgtaatttaggatcacttaatattgcagcagcaatgaatagcgctgacaagttaggtggtttggtttctgatagtgttcaagcgcttaatcgtgttgccaggtcttcagatttagattgtgctccttcaattgaaaagggaaataaagctaatcgagcaatcggtctaggagcaatgaatttacatggctttttagcaactaatcatatttattatgattcaccagaagcagttgaatttacaggaattttcttttatacaattgcataccatgcatttaaagaatcaaataaattagctgaaaagtatggtgcttttaaaggattcaaagattcatcatatgctagtggtgattatttcaaaaaatttattgatgaggaagtctcaccgaaaacagacaagattaaagaaattgtagctaaatataaattagttattccaactaaagaagattgggaagaattgattactaaaattaaaaagacaggtatagctaatgctaacttgttagcagttgcacctactggatcaattagttatttatcttcatgtacaccaagtttgcagccagtagtagctcctgttgaaacacgcaaagaggctgatttgggtcgaatttatgtaccagcttataagattaataaagacaattatgagtattacgaaaagggtgcatatgaagtaggacctaatgctattattgatattacagctgctgcacaaaagtatgttgatcaatcaatttcgttaactttatttgttgaagataatgcaacaacaagagatttaaataaggcttatatttatgcctttaaaaagcgctgcaactcaatttattatgttagaataagagaaaaagttttagctggtagtgagaacttgactgcagacgaatgtttaattcaaaatggtgcagaatgccagaaatgtatgatttagtttaataatagaaaagcagctaaagtgtttattgatatgaaccccgaaattcggacaagaatttcggggtttttatttatgtctaaattatccaaacaagataaaattgatatttacaataattggaaaaattataatatatcagctaatcacgcagcagccgcatgtcatgccggtatgcctggcagctgtctaaatgaataattctgccggtaatgtctgtaatcgcctgggcaagttgcatattttgaagttcctaggtttcaaaaagataagattagaattgactttaatcccaatcattcg
